(19) United States
(12) Patent Application Publication
(10) Pub. No.: US 2003/0064946 A1
(43) Pub. Date: Apr. 3, 2003

(54) Method and reagent for the inhibition of calcium activated chloride channel-1 (CLCA-1)

(76) Inventors: James McSwiggen, Boulder, CO (US); James Thompson, Lafayette, CO (US); Timothy McKenzie, Aurora, CO (US); David Ayers, Broomfield, CO (US); David E. Szymkowski, Mountain View, CA (US); Andrew Grupe, Redwood City, CA (US)

Correspondence Address: MCDONNELL BOEHNEN HULBERT & BERGHOFF, 300 SOUTH WACKER DRIVE, SUITE 3200, CHICAGO, IL, 60606, US

(21) Appl. No.: 09/927,046

(22) Filed: Aug. 9, 2001

Related U.S. Application Data
(60) Provisional application No. 60/224,383, filed on Aug. 9, 2000.

(51) Int. Cl. A61K 48/00; C07H 21/02; C07H 21/04; C12N 15/87

(52) U.S. Cl. 514/44; 536/23.1; 435/320.1; 435/455

(57) ABSTRACT

Nucleic acid molecules, including antisense and enzymatic nucleic acid molecules, such as hammerhead ribozymes, DNAzymes, and GeneBlocs, which modulate the expression of calcium activated chloride channels (CLCA1, CLCA2, CLCA3, and CLCA4).

### BACKGROUND OF THE INVENTION

[0001] The present invention concerns compounds, compositions, and methods for the study, diagnosis, and treatment of conditions and diseases related to the expression of CLCA (Cl⁻ Channel Ca²⁺-Activated) genes.

[0002] The following is a brief description of the current understanding of CLCAs.

[0003] The discussion is not meant to be complete and is provided only for understanding the invention that follows. The summary is not an admission that any of the work described below is prior art to the claimed invention.

[0004] CLCA proteins are emerging as a new class of channel proteins that mediate Ca²⁺-activated Cl⁻ conductance in a variety of tissues. Members of the CLCA family have been cloned, isolated, and partially characterized from human, bovine, and murine species. These proteins demonstrate a high degree of homology in their size, sequence, and predicted structure yet can vary considerably in tissue distribution. Bovine CLCA1 (bCLCA1 or CaCC) was the first reported CLCA homolog. The bCLCA1 protein, which was isolated from and is exclusively detected in trachial epithelial cells, functions as a Ca²⁺-activated Cl⁻ channel (Ran and Benos, 1992, J Biol. Chem., 267, 3618-3625; Cunningham et al., 1995, J. Biol. Cherm, 270, 31016-31026). Another bovine homolog, bovine lung-endothelial cell adhesion molecule-1 (Lu-ECAM-1), appears to have involvement in the preferential metastasis of melanoma cells to the lung. Lu-ECAM-1 shares 92% nucleotide identity to bCLCA1 and is expressed in vascular endothelial cells (Elble et al., 1997, J. Biol. Chem., 272, 27853-27861). It has been shown that Lu-ECAM-1, can mediate the binding of lung-metastatic mouse B 16F 10 melanoma cells to endothelial cells (Zhu et al., 1992, J. Clin. Invest., 89, 1718-1724), however, due to sequence similarity to bCLCA1, the role of Lu-ECAM-1 as a chloride channel has been suggested (Elble et al., supra). The mouse homolog, mCLCA1, appears to have an expression pattern similar to the cystic fibrosis transmembrane conductance regulator (CFTR), with expression seen in various secretory epithelial cells, squamous epithelia, and in some lymphocytes (Gruber et al., 1998, Histochem. Cell Biol., 110,43-49).

[0005] The three human CLCA homologs (hCLCA1, hCLCA2, and hCLCA3) thus far cloned, isolated, and partially characterized, all retain sequence homology, similar cDNA length, and are all located on the short arm of chromosome 1 (tp22-p31). Human CLCA proteins show a restricted pattern of expression in differing secretory tissues. Human CLCA1 was the first reported calcium activated chloride channel in humans. The 31,902-bp hCLCA1 gene is located on chromosome 1p22-p31, contains 14 introns, and is preceded by a canonic promoter region that contains an LI transposable element. Expression of hCLCA1 is predominant in intestinal basal crypt epithelia and goblet cells. A protein processing model has been proposed for hCLCA1 in which the primary translation product (125-kDa) is cleaved to a 90-kDa and a group of 37- to 41-kDa proteins, the latter apparently representing different glycosylation products of the same polypeptide (Gruber et al., 1998, Genomics, 54, 200-214). Transient expression of hCLCA1 cDNA in HEK 293 cells is associated with an increase in whole-cell Ca²⁺-activated Cl⁻ conductance that is susceptible to inhibition with anion channel blocking compounds. Cell attached patch recordings of transfected cells in this study revealed single channels with a slope conductance of 13.4 pS (Gruber et al., supra).

[0006] The hCLCA2 homolog is processed in a similar manner as is hCLCA1, resulting in the formation of a heterodimer consisting of a 90-kDa amino terminal and an approximately 35-kDa carboxy terminal subunit with anchorage to the plasma membrane via four or five transmembrane domains. Expression of hCLCA2 is somewhat less restricted than that of hCLCA1, being expressed from human lung, trachea, and breast tissue (Gruber et al., 1999, Am. J. Physiol., 276, C1261-C1270). Human CLCA2 is expressed in normal breast epithelium but not in breast tumors of different stages of progression, suggesting that hCLCA2 may act as a tumor suppressor in breast cancer (Gruber et al., 1999, Cancer Res., 59, 5488-5491). Human CLCA3 is a truncated, secreted member of the CLCA family which is expressed in numerous tissues including lung, trachea, spleen, thymus, and breast tissue. Unlike hCLCA1 and hCLCA2 which are processed into heterodimers, hCLCA3 mRNA encodes a 37-kDa glycoprotein that corresponds to the N-terminal extracellular domain of its homologs. When hCLCA3 is expressed in HEK 293 or CHO cells, the 37-kDa glycoprotein is secreted (Gruber and Pauli, 1999, Biochem. Biophys. Acta, 1444, 418-423).

[0007] Holroyd et al., International PCT publication No. WO/9944620, describe a calcium-activated chloride channel that is induced by IL-9.

### SUMMARY OF THE INVENTION

[0008] The invention features novel nucleic acid-based techniques [e.g., enzymatic nucleic acid molecules (ribozymes), antisense nucleic acids, 2-5A antisense chimeras, triplex DNA, antisense nucleic acids containing RNA cleaving chemical groups] and methods for their use to modulate the expression of CLCA (Cl⁻ Channel Ca²⁺-Activated) genes.

[0009] In a preferred embodiment, the invention features the use of one or more of the nucleic acid-based techniques independently or in combination to inhibit the expression of the genes encoding hCLCA1, hCLCA2, hCLCA3, and hCLCA4. Specifically, the invention features the use of nucleic acid-based techniques to specifically inhibit the expression of CLCA1 (GenBank accession Nos. NM_{—}001285, AF039400, AF039401, AF127036), CLCA2 (GenBank accession No. NM_{—}006536), CLCA3 (GenBank accession No. NM_{—}004921), and CLCA4 (GenBank accession No. NM_{—}012128) genes. In yet another preferred embodiment, the invention features the inhibition of CLCA1 gene using the nucleic acid-based techniques of the instant invention.

[0010] In another preferred embodiment, the invention features the use of an enzymatic nucleic acid molecule, preferably in the hammerhead, NCH (Inozyme), G-cleaver, amberzyme, zinzyme and/or DNAzyme motif, to inhibit the expression of CLCA genes.

[0011] By “inhibit” it is meant that the activity of CLCA1 or level of RNAs or equivalent RNAs encoding one or more protein subunits of CLCA1 is reduced below that observed in the absence of the nucleic acid molecules of the invention. In one embodiment, inhibition with enzymatic nucleic acid molecules preferably is below that level observed in the presence of an enzymatically inactive or attenuated molecule that is able to bind to the same site on the target RNA, but is unable to cleave that RNA. In another embodiment, inhibition with antisense oligonucleotides is preferably below that level observed in the presence of, for example, an oligonucleotide with scrambled sequence or with mismatches. In another embodiment, inhibition of CLCA1 genes with the nucleic acid molecule of the instant invention is greater than in the presence of the nucleic acid molecule than in its absence, or the presence of a control, irrelevant, or non-inhibitory oligonucleotide.

[0012] By “enzymatic nucleic acid molecule” it is meant a nucleic acid molecule which has complementarity in a substrate binding region to a specified gene target, and also has an enzymatic activity which is active to specifically cleave target RNA. That is, the enzymatic nucleic acid molecule is able to intermolecularly cleave RNA and thereby inactivate a target RNA molecule. These complementary regions allow sufficient hybridization of the enzymatic nucleic acid molecule to the target RNA and thus permit cleavage. One hundred percent complementarity is preferred, but complementarity as low as 50-75% may also be useful in this invention. The nucleic acids may be modified at the base, sugar, and/or phosphate groups. The term enzymatic nucleic acid is used interchangeably with phrases such as ribozymes, catalytic RNA, enzymatic RNA, catalytic DNA, aptazyme or aptamer-binding ribozyme, regulatable ribozyme, catalytic oligonucleotides, nucleozyme, DNAzyme, RNA enzyme, endoribonuclease, endonuclease, minizyme, leadzyme, oligozyme or DNA enzyme. All of these terminologies describe nucleic acid molecules with enzymatic activity. The specific enzymatic nucleic acid molecules described in the instant application are not meant to be limiting and those skilled in the art will recognize that all that is important in an enzymatic nucleic acid molecule of this invention is that it have a specific substrate binding site which is complementary to one or more of the target nucleic acid regions, and that it have nucleotide sequences within or surrounding that substrate binding site which impart a nucleic acid cleaving activity to the molecule (Cech et al., U.S. Pat. No. 4,987,071; Cech et al., 1988, JAMA).

[0013] By “nucleic acid molecule” as used herein is meant a molecule having nucleotides. The nucleic acid can be single, double, or multiple stranded and may comprise modified or unmodified nucleotides or non-nucleotides or various mixtures and combinations thereof.

[0014] By “enzymatic portion” or “catalytic domain” is meant that portion/region of the enzymatic nucleic acid molecule essential for cleavage of a nucleic acid substrate (for example, see FIGS. 1-4).

[0015] By “substrate binding arm” or “substrate binding domain” is meant that portion/region of a ribozyme which is complementary to (i.e., able to base-pair with) a portion of its substrate. Generally, such complementarity is 100%, but can be less if desired. For example, as few as 10 bases out of 14 may be base-paired. Examples of such arms are shown generally in FIGS. 1-4. That is, these arms contain sequences within a ribozyme which are intended to bring ribozyme and target RNA together through complementary base-pairing interactions. The ribozyme of the invention may have binding arms that are contiguous or non-contiguous and may be of varying lengths. The length of the binding arm(s) are preferably greater than or equal to four nucleotides and of sufficient length to stably interact with the target RNA; specifically 12-100 nucleotides; more specifically 14-24 nucleotides long. If two binding arms are chosen, the design is such that the length of the binding arms are symmetrical (i.e., each of the binding arms is of the same length; e.g., five and five nucleotides, six and six nucleotides or seven and seven nucleotides long) or asymmetrical (i.e., the binding arms are of different length; e.g., six and three nucleotides; three and six nucleotides long; four and five nucleotides long; four and six nucleotides long; four and seven nucleotides long; and the like).

[0016] By “NCH” or “Inozyme” motif is meant, an enzymatic nucleic acid molecule comprising a motif as described in Ludwig et al., U.S. Ser. No. 09/406,643, filed Sep. 27, 1999, entitled “COMPOSITIONS HAVING RNA CLEAVING ACTIVITY”, and International PCT publication Nos. WO 98/58058 and WO 98/58057, all incorporated by reference herein in their entirety including the drawings.

[0017] By “G-cleaver” motif is meant, an enzymatic nucleic acid molecule comprising a motif as described in Eckstein et al., International PCT publication No. WO 99/16871, incorporated by reference herein in its entirety including the drawings.

[0018] By “zinzyme” motif is meant, a class II enzymatic nucleic acid molecule comprising a motif as described in Beigelman et al., International PCT publication No. WO 99/55857, incorporated by reference herein in its entirety including the drawings. Zinzymes represent a non-limiting example of an enzymatic nucleic acid molecule that does not require a ribonucleotide (2′-OH) group within its own nucleic acid sequence for activity.

[0019] By “amberzyme” motif is meant, a class I enzymatic nucleic acid molecule comprising a motif as described in Beigelman et al., International PCT publication No. WO 99/55857, incorporated by reference herein in its entirety including the drawings. Amberzymes represent a non-limiting example of an enzymatic nucleic acid molecule that does not require a ribonucleotide (2′-OH) group within its own nucleic acid sequence for activity.

[0020] By ‘DNAzyme’ is meant, an enzymatic nucleic acid molecule that does not require the presence of a ribonucleotide (2′-OH) group within the DNAzyme molecule for its activity. In particular embodiments the enzymatic nucleic acid molecule may have an attached linker(s) or other attached or associated groups, moieties, or chains containing one or more nucleotides with 2′-OH groups.

[0021] DNAzyme can be synthesized chemically or expressed endogenously in vivo, by means of a single stranded DNA vector or equivalent thereof.

[0022] By “sufficient length” is meant an oligonucleotide of greater than or equal to 3 nucleotides that is of a length great enough to provide the intended function under the expected condition. For example, for binding arms of enzymatic nucleic acid “sufficient length” means that the binding arm sequence is long enough to provide stable binding to a target site under the expected binding conditions. Preferably, the binding arms are not so long as to prevent useful turnover.

[0023] By “stably interact” is meant, interaction of the oligonucleotides with target nucleic acid (e.g., by forming hydrogen bonds with complementary nucleotides in the target under physiological conditions).

[0024] By “equivalent” RNA to CLCA1 is meant to include those naturally occurring RNA molecules having homology (partial or complete) to CLCA1 proteins or encoding for proteins with similar function as CLCA1 in various organisms, including human, rodent, primate, rabbit, pig, protozoans, fungi, plants, and other microorganisms and parasites. The equivalent RNA sequence also includes in addition to the coding region, regions such as 5′-untranslated region, 3′-untranslated region, introns, intron-exon junction and the like.

[0025] By “homology” is meant the nucleotide sequence of two or more nucleic acid molecules is partially or completely identical.

[0026] By “antisense nucleic acid”, it is meant a non-enzymatic nucleic acid molecule that binds to target RNA by means of RNA-RNA or RNA-DNA or RNA-PNA (protein nucleic acid; Egholm et al., 1993 Nature 365, 566) interactions and alters the activity of the target RNA (for a review, see Stein and Cheng, 1993 25 Science 261, 1004 and Woolf et al, U.S. Pat. No. 5,849,902). Typically, antisense molecules will be complementary to a target sequence along a single contiguous sequence of the antisense molecule. However, in certain embodiments, an antisense molecule may bind to substrate such that the substrate molecule forms a loop, and/or an antisense molecule may bind such that the antisense molecule forms a loop. Thus, the antisense molecule may be complementary to two (or even more) non-contiguous substrate sequences or two (or even more) non-contiguous sequence portions of an antisense molecule may be complementary to a target sequence or both. For a review of current antisense strategies, see Schmajuk et al., 1999, J. Biol. Chem., 274, 21783-21789, Delihas et al., 1997, Nature, 15, 751-753, Stein et al., 1997, Antisense N. A. Drug Dev., 7, 151, Crooke, 1998, Biotech. Genet. Eng. Rev., 15, 121-157, Crooke, 1997, Ad. Pharmacol., 40, 1-49. In addition, antisense DNA can be used to target RNA by means of DNA-RNA interactions, thereby activating RNase H, which digests the target RNA in the duplex. Antisense DNA can be synthesized chemically or expressed via the use of a single stranded DNA expression vector or equivalent thereof.

[0027] By “2-5A antisense chimera” it is meant, an antisense oligonucleotide containing a 5′-phosphorylated 2′-5′-linked adenylate residue. These chimeras bind to target RNA in a sequence-specific manner and activate a cellular 2-5A-dependent ribonuclease which, in turn, cleaves the target RNA (Torrence et al., 1993 Proc. Natl. Acad. Sci. USA 90, 1300).

[0028] By “triplex DNA” it is meant an oligonucleotide that can bind to a double-stranded DNA in a sequence-specific manner to form a triple-strand helix. Formation of such triple helix structure has been shown to inhibit transcription of the targeted gene (Duval-Valentin et al., 1992 Proc. Natl. Acad. Sci. USA 89, 504).

[0029] By “gene” it is meant a nucleic acid that encodes an RNA.

[0030] By “complementarity” is meant that a nucleic acid can form hydrogen bond(s) with another RNA sequence by either traditional Watson-Crick or other non-traditional types. In reference to the nucleic molecules of the present invention, the binding free energy for a nucleic acid molecule with its target or complementary sequence is sufficient to allow the relevant function of the nucleic acid to proceed, e.g., ribozyme cleavage, antisense or triple helix inhibition. Determination of binding free energies for nucleic acid molecules is well known in the art (see, e.g., Turner et al., 1987, CSHSymp. Quant. Biol. LII pp.123-133; Frier et al., 1986, Proc. Nat. Acad. Sci. USA 83:9373-9377; Turner et al., 1987, J. Am. Chem. Soc. 109:3783-3785). A percent complementarity indicates the percentage of contiguous residues in a nucleic acid molecule which can form hydrogen bonds (e.g., Watson-Crick base pairing) with a second nucleic acid sequence (e.g., 5, 6, 7, 8, 9, 10 out of 10 being 50%, 60%, 70%, 80%, 90%, and 100% complementary). “Perfectly complementary” means that all the contiguous residues of a nucleic acid sequence will hydrogen bond with the same number of contiguous residues in a second nucleic acid sequence.

[0031] At least seven basic varieties of naturally occurring enzymatic nucleic acids are known presently. Each can catalyze the hydrolysis of RNA phosphodiester bonds in trans (and thus can cleave other RNA molecules) under physiological conditions. Table I summarizes some of the characteristics of these ribozymes. In general, enzymatic nucleic acids act by first binding to a target RNA. Such binding occurs through the target binding portion of a enzymatic nucleic acid which is held in close proximity to an enzymatic portion of the molecule that acts to cleave the target RNA. Thus, the enzymatic nucleic acid first recognizes and then binds a target RNA through complementary base-pairing, and once bound to the correct site, acts enzymatically to cut the target RNA. Strategic cleavage of such a target RNA will destroy its ability to direct synthesis of an encoded protein. After an enzymatic nucleic acid has bound and cleaved its RNA target, it is released from that RNA to search for another target and can repeatedly bind and cleave new targets. Thus, a single ribozyme molecule is able to cleave many molecules of target RNA. In addition, the ribozyme is a highly specific inhibitor of gene expression, with the specificity of inhibition depending not only on the base-pairing mechanism of binding to the target RNA, but also on the mechanism of target RNA cleavage. Single mismatches, or base-substitutions, near the site of cleavage can completely eliminate catalytic activity of a ribozyme.

[0032] The enzymatic nucleic acid molecule that cleave the specified sites in CLCA1-specific RNAs represent a novel therapeutic approach to treat Chronic Obstructive Pulmonary Diseases (COPDs), chronic bronchitis, asthma, cystic fibrosis, obstructive bowel syndrome, and other indications that may respond to the level of CLCA1.

[0033] In one of the preferred embodiments of the inventions described herein, the enzymatic nucleic acid molecule is formed in a hammerhead or hairpin motif, but may also be formed in the motif of a hepatitis delta virus, group I intron, group II intron or RNase P RNA (in association with an RNA guide sequence), Neurospora VS RNA, DNAzymes, NCH cleaving motifs, or G-cleavers. Examples of such hammerhead motifs are described by Dreyfus, supra, Rossi et al., 1992, AIDS Research and Human Retroviruses 8, 183; Examples of hairpin motifs are described by Hampel et al., EP0360257, Hampel and Tritz, 1989 Biochemistry 28, 4929, Feldstein et al., 1989, Gene 82, 53, Haseloff and Gerlach, 1989, Gene, 82, 43, Hampel et al., 1990 Nucleic Acids Res. 18, 299; Chowrira & McSwiggen, U.S. Pat. No. 5,631,359. The hepatitis delta virus motif is described by Perrotta and Been, 1992 Biochemistry 31, 16. The RNase P motif is described by Guerrier-Takada et al., 1983 Cell 35, 849; Forster and Altman, 1990, Science 249, 783; Li and Altman, 1996, Nucleic Acids Res. 24, 835. Neurospora VS RNA ribozyme motif is described by Collins (Saville and Collins, 1990 Cell 61, 685-696; Saville and Collins, 1991 Proc. Natl. Acad. Sci. USA 88, 8826-8830; Collins and Olive, 1993 Biochemistry 32, 2795-2799; Guo and Collins, 1995, EMBO. J. 14, 363). Group II introns are described by Griffin et al., 1995, Chem. Biol. 2, 761; Michels and Pyle, 1995, Biochemistry 34, 2965; Pyle et al., International PCT Publication No. WO 96/22689. The Group I intron is described by Cech et al., U.S. Pat. No. 4,987,071. DNAzymes are described by Usman et al., International PCT Publication No. WO 95/11304; Chartrand et al., 1995, NAR 23, 4092; Breaker et al., 1995, Chem. Bio. 2, 655; Santoro et al., 1997, PNAS 94, 4262. NCH cleaving motifs are described in Ludwig & Sproat, International PCT Publication No. WO 98/58058; and G-cleavers are described in Kore et al., 1998, Nucleic Acids Research 26, 4116-4120 and Eckstein et al., International PCT Publication No. WO 99/16871. Additional motifs such as the Aptazyme (Breaker et al., WO 98/43993), Amberzyme (Class I motif; FIG. 3; Beigelman et al., International PCT publication No. WO 99/55857) and Zinzyme (Beigelman et al., International PCT publication No. WO 99/55857), all these references are incorporated by reference herein in their totalities, including drawings and can also be used in the present invention. These specific motifs are not limiting in the invention, and those skilled in the art will recognize that all that is important in an enzymatic nucleic acid molecule of this invention is that it has a specific substrate binding site which is complementary to one or more of the target gene RNA regions, and that it have nucleotide sequences within or surrounding that substrate binding site which impart an RNA cleaving activity to the molecule (Cech et al., U.S. Pat. No. 4,987,071).

[0034] In preferred embodiments of the present invention, a nucleic acid molecule, e.g., an antisense molecule, a triplex DNA, or a ribozyme, is 13 to 100 nucleotides in length, e.g., in specific embodiments 35, 36, 37, or 38 nucleotides in length (e.g., for particular ribozymes or antisense). In particular embodiments, the nucleic acid molecule is 15-100, 17-100, 20-100, 21-100, 23-100, 25-100, 27-100, 30-100, 32-100, 35-100, 40-100, 50-100, 60-100, 70-100, or 80-100 nucleotides in length. Instead of 100 nucleotides being the upper limit on the length ranges specified above, the upper limit of the length range can be, for example, 30, 40, 50, 60, 70, or 80 nucleotides. Thus, for any of the length ranges, the length range for particular embodiments has lower limit as specified, with an upper limit as specified which is greater than the lower limit. For example, in a particular embodiment, the length range can be 35-50 nucleotides in length. All such ranges are expressly included. Also in particular embodiments, a nucleic acid molecule can have a length which is any of the lengths specified above, for example, 21 nucleotides in length.

[0035] In a preferred embodiment, the invention provides a method for producing a class of nucleic acid-based gene inhibiting agents which exhibit a high degree of specificity for the RNA of a desired target. For example, the enzymatic nucleic acid molecule is preferably targeted to a highly conserved sequence region of target RNAs encoding CLCA proteins (for example, CLCA1, CLCA2, CLCA3 and/or CLCA4) such that specific treatment of a disease or condition can be provided with either one or several nucleic acid molecules of the invention. Such nucleic acid molecules can be delivered exogenously to specific tissue or cellular targets as required. Alternatively, the nucleic acid molecules (e.g., ribozymes and antisense) can be expressed from DNA and/or RNA vectors that are delivered to specific cells.

[0036] In a preferred embodiment, the invention features the use of nucleic acid-based inhibitors of the invention to specifically target genes that share homology with the CLCA1 gene.

[0037] As used herein “cell” is used in its usual biological sense, and does not refer to an entire multicellular organism, e.g., specifically does not refer to a human. The cell may be present in a non-human multicellular organism, e.g., birds, plants and mammals such as cows, sheep, apes, monkeys, swine, dogs, and cats.

[0038] By “CLCA proteins” is meant, a protein or a mutant protein derivative thereof, comprising a calcium activated chloride channel protein.

[0039] By “highly conserved sequence region” is meant, a nucleotide sequence of one or more regions in a target gene does not vary significantly from one generation to the other or from one biological system to the other.

[0040] The nucleic acid-based inhibitors of CLCA1 expression are useful for the prevention and/or treatment of diseases and conditions including Chronic Obstructive Pulmonary Disease (COPD), chronic bronchitis, asthma, cystic fibrosis, obstructive bowel syndrome, and any other diseases or conditions that are related to or will respond to the levels of CLCA1 in a cell or tissue, alone or in combination with other therapies.

[0041] By “related” is meant that the reduction of CLCA1 expression (specifically CLCA1 gene) RNA levels and thus reduction in the level of the respective protein will relieve, to some extent, the symptoms of the disease or condition.

[0042] The nucleic acid-based inhibitors of the invention are added directly, or can be complexed with cationic lipids, packaged within liposomes, or otherwise delivered to target cells or tissues. The nucleic acid or nucleic acid complexes can be locally administered to relevant tissues ex vivo, or in vivo through injection, infusion pump or stent, with or without their incorporation in biopolymers. In preferred embodiments, the enzymatic nucleic acid inhibitors comprise sequences, which are complementary to the substrate sequences in Tables III to IX. Examples of such enzymatic nucleic acid molecules also are shown in Tables III to IX. Examples of such enzymatic nucleic acid molecules consist essentially of sequences defined in these Tables.

[0043] In yet another embodiment, the invention features antisense nucleic acid molecules and 2-5A chimera including sequences complementary to the substrate sequences shown in Tables III to IX. Such nucleic acid molecules can include sequences as shown for the binding arms of the enzymatic nucleic acid molecules in Tables III to VIII and sequences shown as GeneBloc™ sequences in Table IX. Similarly, triplex molecules can be provided targeted to the corresponding DNA target regions, and containing the DNA equivalent of a target sequence or a sequence complementary to the specified target (substrate) sequence. Typically, antisense molecules will be complementary to a target sequence along a single contiguous sequence of the antisense molecule. However, in certain embodiments, an antisense molecule may bind to substrate such that the substrate molecule forms a loop, and/or an antisense molecule may bind such that the antisense molecule forms a loop. Thus, the antisense molecule may be complementary to two (or even more) non-contiguous substrate sequences or two (or even more) non-contiguous sequence portions of an antisense molecule may be complementary to a target sequence or both.

[0044] By “consists essentially of” is meant that the active nucleic acid molecule of the invention, for example, an enzymatic nucleic acid molecule, contains an enzymatic center or core equivalent to those in the examples, and binding arms able to bind RNA such that cleavage at the target site occurs. Other sequences can be present which do not interfere with such cleavage. Thus, a core region can, for example, include one or more loop, stem-loop structure, or linker which does not prevent enzymatic activity. Thus, the underlined regions in the sequences in Tables III, IV and VIII can be such a loop, stem-loop, nucleotide linker, and/or non-nucleotide linker and can be represented generally as sequence “X”. For example, a core sequence for a hammerhead enzymatic nucleic acid can comprise a conserved sequence, such as 5′-CUGAUGAG-3′ and 5′-CGAA-3′ connected by “X”, where X is 5′-GCCGUUAGGC-3′ (SEQ ID NO 5450), or any other Stem II region known in the art.

[0045] In another aspect of the invention, ribozymes or antisense molecules that interact with target RNA molecules and inhibit CLCA1 (specifically CLCA1 gene) activity are expressed from transcription units inserted into DNA or RNA vectors. The recombinant vectors are preferably DNA plasmids or viral vectors. Ribozyme or antisense expressing viral vectors could be constructed based on, but not limited to, adeno-associated virus, retrovirus, adenovirus, or alphavirus. Preferably, the recombinant vectors capable of expressing the ribozymes or antisense are delivered as described above, and persist in target cells. Alternatively, viral vectors may be used that provide for transient expression of ribozymes or antisense. Such vectors can be repeatedly administered as necessary. Once expressed, the ribozymes or antisense bind to the target RNA and inhibit its function or expression. Delivery of ribozyme or antisense expressing vectors can be systemic, such as by intravenous or intramuscular administration, by administration to target cells ex-planted from the patient followed by reintroduction into the patient, or by any other means that would allow for introduction into the desired target cell. Antisense DNA can be expressed endogenously via the use of a single stranded DNA intracellular expression vector.

[0046] By RNA is meant a molecule comprising at least one ribonucleotide residue. By “ribonucleotide” is meant a nucleotide with a hydroxyl group at the 2′ position of a β-D-ribo-faranose moiety.

[0047] By “vectors” is meant any nucleic acid- and/or viral-based technique used to deliver a desired nucleic acid.

[0048] By “patient” is meant an organism, which is a donor or recipient of explanted cells or the cells themselves. “Patient” also refers to an organism to which the nucleic acid molecules of the invention can be administered. Preferably, a patient is a mammal or mammalian cells. More preferably, a patient is a human or human cells.

[0049] The nucleic acid molecules of the instant invention, individually, or in combination or in conjunction with other drugs, can be used to treat diseases or conditions discussed above. For example, to treat a disease or condition associated with the levels of CLCA1, the patient may be treated, or other appropriate cells may be treated, as is evident to those skilled in the art, individually or in combination with one or more drugs under conditions suitable for the treatment.

[0050] In a further embodiment, the described molecules, such as antisense or ribozymes, can be used in combination with other known treatments to treat conditions or diseases discussed above. For example, the described molecules could be used in combination with one or more known therapeutic agents to treat Chronic Obstructive Pulmonary Diseases (COPDs), chronic bronchitis, asthma, cystic fibrosis, obstructive bowel syndrome, and/or other disease states or conditions which respond to the modulation of CLCA1 expression.

[0051] In another preferred embodiment, the invention features nucleic acid-based inhibitors (e.g., enzymatic nucleic acid molecules (ribozymes), antisense nucleic acids, 2-5A antisense chimeras, triplex DNA, antisense nucleic acids containing RNA cleaving chemical groups) and methods for their use to down regulate or inhibit the expression of genes (e.g., CLCA1) capable of progression and/or maintenance of Chronic Obstructive Pulmonary Diseases (COPDs), chronic bronchitis, asthma, cystic fibrosis, obstructive bowel syndrome, and/or other disease states or conditions which respond to the modulation of CLCA1 expression.

[0052] By “comprising” is meant including, but not limited to, whatever follows the word “comprising”. Thus, use of the term “comprising” indicates that the listed elements are required or mandatory, but that other elements are optional and may or may not be present. By “consisting of” is meant including, and limited to, whatever follows the phrase “consisting of”. Thus, the phrase “consisting of” indicates that the And listed elements are required or mandatory, and that no other elements may be present. By “consisting essentially of” is meant including any elements listed after the phrase, and limited to other elements that do not interfere with or contribute to the activity or action specified in the disclosure for the listed elements. Thus, the phrase “consisting essentially of” indicates that the listed elements are required or mandatory, but that other elements are optional and may or may not be present depending upon whether or not they affect the activity or action of the listed elements.

[0053] The foregoing description of the various aspects and embodiments is provided with reference to the exemplary calcium activated chloride channel gene CLCA1, which is also referred to as CaCC1 or ICACC-1. However, the various aspects and embodiments are also directed to other genes which express CLCA1 or CaCC1-like proteins (for example hCLCA2, hCLCA3, hCLCA4, CaCC2, and CaCC3). Those additional genes can be analyzed for target sites using the methods described for CLCA1. Thus, the inhibition and the effects of such inhibition of the other genes can be performed as described herein.

[0054] Other features and advantages of the invention will be apparent from the following description of the preferred embodiments thereof, and from the claims.

### DESCRIPTION OF THE PREFERRED EMBODIMENTS

[0055] First the drawings will be described briefly.

[0056] Drawings

[0057] FIG. 1 shows examples of chemically stabilized ribozyme motifs. HH Rz, 5 represents hammerhead ribozyme motif (Usman et al., 1996, Curr. Op. Struct. Bio., 1, 527); NCH Rz represents the NCH ribozyme motif (Ludwig & Sproat, International PCT Publication No. WO 98/58058); G-Cleaver, represents G-cleaver ribozyme motif (Kore et al., 1998, Nucleic Acids Research 26, 4116-4120). N or n, represent independently a nucleotide which may be same or different and have complementarity to each other; rI, represents ribo-Inosine nucleotide; arrow indicates the site of cleavage within the target. Position 4 of the HH Rz and the NCH Rz is shown as having 2′-C-allyl modification, but those skilled in the art will recognize that this position can be modified with other modifications well known in the art, so long as such modifications do not significantly inhibit the activity of the ribozyme.

[0058] FIG. 2 shows an example of the Amberzyme ribozyme motif that is chemically stabilized (see, for example, Beigelman et al., International PCT publication No. WO 99/55857, incorporated by reference herein; also referred to as Class I Motif). The Amberzyme motif is a class of enzymatic nucleic molecules that do not require the presence of a ribonucleotide (2′-OH) group for its activity.

[0059] FIG. 3 shows an example of the Zinzyme A ribozyme motif that is chemically stabilized (Beigelman et al., International PCT publication No. WO 99/55857, incorporated by reference herein; also referred to as Class A or Class II Motif). The Zinzyme motif is a class of enzymatic nucleic molecules that do not require the presence of a ribonucleotide (2′-OH) group for its activity.

[0060] FIG. 4 shows an example of a DNAzyme motif described by Santoro et al., 1997, PNAS, 94, 4262.

[0061] FIGS. 5A and 5B are diagrammatic schemes representative of the process used for Target Discovery in the instant invention. The process for Target Discovery is described in Jarvis et al., International PCT publication No. WO 98/50530, incorporated by reference herein in its entirety including the Figures.

### MECHANISM OF ACTION OF NUCLEIC ACID MOLECULES OF THE INVENTION

[0062] Antisense:

[0063] Antisense molecules may be modified or unmodified RNA, DNA, or mixed polymer oligonucleotides which primarily function by specifically binding to matching sequences resulting in inhibition of peptide synthesis (Wu-Pong, Nov 1994, BioPharm, 20-33). The antisense oligonucleotide binds to target RNA by Watson Crick base-pairing and blocks gene expression by preventing ribosomal translation of the bound sequences either by steric blocking or by activating RNase H enzyme. Antisense molecules can also alter protein synthesis by interfering with RNA processing or transport from the nucleus into the cytoplasm (Mukhopadhyay & Roth, 1996, Crit. Rev. in Oncogenesis 7, 151-190).

[0064] In addition, binding of single stranded DNA to RNA may result in nuclease degradation of the heteroduplex (Wu-Pong, supra; Crooke, supra). To date, the only backbone modified DNA chemistry which will act as substrates for RNase H are phosphorothioates, phosphorodithioates, and borontrifluoridates. Recently it has been reported that 2′-arabino and 2′-fluoro arabino-containing oligos can also activate RNase H activity.

[0065] A number of antisense molecules have been described that utilize novel configurations of chemically modified nucleotides, secondary structure, and/or RNase H substrate domains (Woolf et al., International PCT Publication No. WO 98/13526; Thompson et al., International PCT Publication No. WO 99/54459; Hartmann et al., U.S. Ser. No. 60/101,174 which was filed on September 21, 1998) all of these are incorporated by reference herein in their entirety.

[0066] In addition, antisense deoxyoligoribonucleotides can be used to target RNA by means of DNA-RNA interactions, thereby activating RNase H, which digests the target RNA in the duplex. Antisense DNA can be expressed endogenously in vivo via the use of a single stranded DNA intracellular expression vector or equivalents and variations thereof.

[0067] Triplex Forming Oligonucleotides (TFO):

[0068] Single stranded DNA may be designed to bind to genomic DNA in a sequence specific manner. TFOs are comprised of pyrimidine-rich oligonucleotides which bind DNA helices through Hoogsteen Base-pairing (Wu-Pong, supra). The resulting triple helix composed of the DNA sense, DNA antisense, and TFO disrupts RNA synthesis by RNA polymerase. The TFO mechanism may result in gene expression or cell death since binding may be irreversible (Mukhopadhyay & Roth, supra).

[0069] 2-5A Antisense Chimera:

[0070] The 2-5A system is an interferon mediated mechanism for RNA degradation found in higher vertebrates (Mitra et al., 1996, Proc Nat Acad Sci USA 93, 6780-6785). Two types of enzymes, 2-5A synthetase and RNase L, are required for RNA cleavage. The 2-SA synthetases require double stranded RNA to form 2′-5′ oligoadenylates (2-SA). 2-5A then acts as an allosteric effector for utilizing RNase L which has the ability to cleave single stranded RNA. The ability to form 2-5A structures with double stranded RNA makes this system particularly useful for inhibition of viral replication.

[0071] (2′-5′) oligoadenylate structures may be covalently linked to antisense molecules to form chimeric oligonucleotides capable of RNA cleavage (Torrence, supra). These molecules putatively bind and activate a 2-SA dependent RNase, the oligonucleotide/enzyme complex then binds to a target RNA molecule which can then be cleaved by the RNase enzyme.

[0072] Enzymatic Nucleic Acid:

[0073] Seven basic varieties of naturally occurring enzymatic RNAs are presently known. In addition, several in vitro selection (evolution) strategies (Orgel, 1979, Proc. R. Soc. London, B 205, 435) have been used to evolve new nucleic acid catalysts capable of catalyzing cleavage and ligation of phosphodiester linkages (Joyce, 1989, Gene, 82, 83-87; Beaudry et al., 1992, Science 257, 635-641; Joyce, 1992, Scientific American 267, 90-97; Breaker et al., 1994, TIBTECH 12, 268; Bartel et al., 1993, Science 261:1411-1418; Szostak, 1993, TIBS 17, 89-93; Kumar et al., 1995, FASEB J., 9, 1183; Breaker, 1996, Curr. Op. Biotech., 7, 442; Santoro et al., 1997, Proc. Natl. Acad. Sci., 94, 4262; Tang et al., 1997, RNA 3, 914; Nakamaye & Eckstein, 1994, supra; Long & Uhlenbeck, 1994, supra; Ishizaka et al., 1995, supra; Vaish et al., 1997, Biochemistry 36, 6495; all of these are incorporated by reference herein). Each can catalyze a series of reactions including the hydrolysis of phosphodiester bonds in trans (and thus can cleave other RNA molecules) under physiological conditions.

[0074] Nucleic acid molecules of this invention will block to some extent CLCA1 protein expression and can be used to treat disease or diagnose disease associated with the levels of CLCA1.

[0075] The enzymatic nature of a ribozyme has significant advantages, such as the concentration of ribozyme necessary to affect a therapeutic treatment is lower. This advantage reflects the ability of the ribozyme to act enzymatically. Thus, a single ribozyme molecule is able to cleave many molecules of target RNA. In addition, the ribozyme is a highly specific inhibitor, with the specificity of inhibition depending not only on the base-pairing mechanism of binding to the target RNA, but also on the mechanism of target RNA cleavage. Single mismatches, or base-substitutions, near the site of cleavage can be chosen to completely eliminate catalytic activity of a ribozyme.

[0076] Nucleic acid molecules having an endonuclease enzymatic activity are able to repeatedly cleave other separate RNA molecules in a nucleotide base sequence-specific manner. Such enzymatic nucleic acid molecules can be targeted to virtually any RNA transcript, and achieve efficient cleavage in vitro (Zaug et al., 324, Nature 429 1986 ; Uhlenbeck, 1987 Nature 328, 596; Kim et al., 84 Proc. Natl. Acad. Sci. USA 8788, 1987; Dreyfus, 1988, Einstein Quart. J Bio. Med., 6, 92; Haseloff and Gerlach, 334 Nature 585, 1988; Cech, 260 JAMA 3030, 1988; and Jefferies et al., 17 Nucleic Acids Research 1371, 1989; Santoro et al., 1997 supra).

[0077] Because of their sequence specificity, trans-cleaving ribozymes show promise as therapeutic agents for human disease (Usman and McSwiggen, 1995 Ann. Rep. Med. Chem. 30, 285-294; Christoffersen and Marr, 1995 J. Med. Chem. 38, 2023-2037). Ribozymes can be designed to cleave specific RNA targets within the background of cellular RNA. Such a cleavage event renders the RNA non-functional and abrogates protein expression from that RNA. In this manner, synthesis of a protein associated with a disease state can be selectively inhibited (Warashina et al., 1999, Chemistry and Biology, 6, 237-250).

[0078] The nucleic acid molecules of the instant invention are also referred to as GeneBloc reagents, which are essentially nucleic acid molecules (e.g.; ribozymes, antisense) capable of down-regulating gene expression.

[0079] GeneBlocs are modified oligonucleotides including ribozymes and modified antisense oligonucleotides that bind to and target specific mRNA molecules. Because GeneBlocs can be designed to target any specific mRNA, their potential applications are quite broad. Traditional antisense approaches have often relied heavily on the use of phosphorothioate modifications to enhance stability in biological samples, leading to a myriad of specificity problems stemming from non-specific protein binding and general cytotoxicity (Stein, 1995, Nature Medicine, 1, 1119). In contrast, GeneBlocs contain a number of modifications that confer nuclease resistance while making minimal use of phosphorothioate linkages, which reduces toxicity, increases binding affinity and minimizes non-specific effects compared with traditional antisense oligonucleotides. Similar reagents have recently been utilized successfully in various cell culture systems (Vassar, et al., 1999, Science, 286, 735) and in vivo (Jarvis et al., manuscript in preparation). In addition, novel cationic lipids can be utilized to enhance cellular uptake in the presence of serum. Since ribozymes and antisense oligonucleotides regulate gene expression at the RNA level, the ability to maintain a steady-state dose of GeneBloc over several days was important for target protein and phenotypic analysis. The advances in resistance to nuclease degradation and prolonged activity in vitro have supported the use of GeneBlocs in target validation applications.

[0080] Target Sites

[0081] Targets for useful ribozymes and antisense nucleic acids can be determined as disclosed in Draper et al, WO 93/23569; Sullivan et al., WO 93/23057; Thompson et al., WO 94/02595; Draper et al., WO 95/04818; McSwiggen et al., U.S. Pat. No. 5,525,468. All of these publications are hereby incorporated by reference herein in their totality. Other examples include the following PCT applications, which concern inactivation of expression of disease-related genes: WO 95/23225, WO 95/13380, WO 94/02595, all of which are incorporated by reference herein. Rather than repeat the guidance provided in those documents here, specific examples of such methods are provided herein, not limiting to those in the art. Ribozymes and antisense to such targets are designed as described in those applications and synthesized to be tested in vitro and in vivo, as also described. The sequences of human CLCA1 RNAs were screened for optimal enzymatic nucleic acid and antisense target sites using a computer-folding algorithm. Antisense, hammerhead, DNAzyme, NCH, amberzyme, zinzyme, or G-Cleaver ribozyme binding/cleavage sites were identified. These sites are shown in Tables III to IX (all sequences are 5′ to 3′ in the tables; the underlined region can be any base-paired sequence, the actual sequence is not relevant here). The nucleotide base position is noted in the Tables as that site to be cleaved by the designated type of enzymatic nucleic acid molecule. While human sequences can be screened and enzymatic nucleic acid molecule and/or antisense thereafter designed, as discussed in Stinchcomb et al., WO 95/23225, mouse targeted ribozymes may be useful to test efficacy of action of the enzymatic nucleic acid molecule and/or antisense prior to testing in humans.

[0082] Antisense, hammerhead, DNAzyme, NCH, amberzyme, zinzymne or G-Cleaver ribozyme binding/cleavage sites were identified. The nucleic acid molecules are individually analyzed by computer folding (Jaeger et al., 1989 Proc. Natl. Acad. Sci. USA, 86, 7706) to assess whether the sequences fold into the appropriate secondary structure. Those nucleic acid molecules with unfavorable intramolecular interactions such as between the binding arms and the catalytic core are eliminated from consideration. Varying binding arm lengths can be chosen to optimize activity.

[0083] Antisense, hammerhead, DNAzyme, NCH, amberzyme, zinzyme or G-Cleaver ribozyme binding/cleavage sites were identified and were designed to anneal to various sites in the RNA target. The binding arms are complementary to the target site sequences described above. The nucleic acid molecules were chemically synthesized. The method of synthesis used follows the procedure for normal DNA/RNA synthesis as described below and in Usman et al., 1987 J. Am. Chem. Soc., 109, 7845; Scaringe et al., 1990 Nucleic Acids Res., 18, 5433; Wincott et al., 1995 Nucleic Acids Res. 23, 2677-2684; and Caruthers et al., 1992, Methods in Enzymology 211,3-19.

[0084] Synthesis of Nucleic Acid Molecules

[0085] Synthesis of nucleic acids greater than 100 nucleotides in length is difficult using automated methods, and the therapeutic cost of such molecules is prohibitive. In this invention, small nucleic acid motifs (“small refers to nucleic acid motifs no more than 100 nucleotides in length, preferably no more than 80 nucleotides in length, and most preferably no more than 50 nucleotides in length; e.g., antisense oligonucleotides, hammerhead or the NCH ribozymes) are preferably used for exogenous delivery. The simple structure of these molecules increases the ability of the nucleic acid to invade targeted regions of RNA structure. Exemplary molecules of the instant invention are chemically synthesized, and others can similarly be synthesized.

[0086] Oligonucleotides (e.g.; antisense GeneBlocs) are synthesized using protocols known in the art as described in Caruthers et al., 1992, Methods in Enzymology 211, 3-19, Thompson et al., International PCT Publication No. WO 99/54459, Wincott et al., 1995, Nucleic Acids Res. 23, 2677-2684, Wincott et al., 1997, Methods Mol. Bio., 74, 59, Brennan et al., 1998, Biotechnol Bioeng., 61, 33-45, and Brennan, US patent No. 6,001,311. All of these references are incorporated herein by reference. The synthesis of oligonucleotides makes use of common nucleic acid protecting and coupling groups, such as dimethoxytrityl at the 5′-end, and phosphoramidites at the 3′-end. In a non-limiting example, small scale syntheses are conducted on a 394 Applied Biosystems, Inc. synthesizer using a 0.2 Rmol scale protocol with a 2.5 min coupling step for 2′-O-methylated nucleotides and a 45 sec coupling step for 2′-deoxy nucleotides. Table II outlines the amounts and the contact times of the reagents used in the synthesis cycle. Alternatively, syntheses at the 0.2 μmol scale can be performed on a 96-well plate synthesizer, such as the instrument produced by Protogene (Palo Alto, Calif.) with minimal modification to the cycle. A 33-fold excess (60 μL of 0.11 M=6.6 Rmol) of 2′-O-methyl phosphoramidite and a 105-fold excess of S-ethyl tetrazole (60 μL of 0.25 M =15 μmol) can be used in each coupling cycle of 2′-O-methyl residues relative to polymer-bound 5′-hydroxyl. A 22-fold excess (40 μL of 0.11 M=4.4 μmol) of deoxy phosphoramidite and a 70-fold excess of S-ethyl tetrazole (40 μL of 0.25 M =10 μmol) can be used in each coupling cycle of deoxy residues relative to polymer-bound 5′-hydroxyl. Average coupling yields on the 394 Applied Biosystems, Inc. synthesizer, determined by colorimetric quantitation of the trityl fractions, are typically 97.5-99%. Other oligonucleotide synthesis reagents for the 394 Applied Biosystems, Inc. synthesizer include; detritylation solution is 3% TCA in methylene chloride (ABI); capping is performed with 16% N-methyl imidazole in THF (ABI) and 10% acetic anhydride/10% 2,6-lutidine in THF (ABI); and oxidation solution is 16.9 mM 12, 49 mM pyridine, 9% water in THF (PERSEPTIVE™). Burdick & Jackson Synthesis Grade acetonitrile is used directly from the reagent bottle. S-Ethyltetrazole solution (0.25 M in acetonitrile) is made up from the solid obtained from American International Chemical, Inc. Alternately, for the introduction of phosphorothioate linkages, Beaucage reagent (3H-1,2-Benzodithiol-3-one 1,1-dioxide, 0.05 M in acetonitrile) is used.

[0087] Deprotection of the antisense oligonucleotides is performed as follows: the polymer-bound trityl-on oligoribonucleotide is transferred to a 4 mL glass screw top vial and suspended in a solution of 40% aq. methylamine (1 mL) at 65° C. for 10 min. After cooling to -20° C., the supernatant is removed from the polymer support.

[0088] The support is washed three times with 1.0 mL of EtOH:MeCN:H20/3 :1: 1, vortexed and the supernatant is then added to the first supernatant. The combined supernatants, containing the oligoribonucleotide, are dried to a white powder. The method of synthesis used for normal RNA including certain enzymatic nucleic acid molecules follows the procedure as described in Usman et al., 1987, J. Am. Chem. Soc., 109, 7845; Scaringe et al., 1990, Nucleic Acids Res., 18, 5433; Wincott et al., 1995, Nucleic Acids Res. 23, 2677-2684 and Wincott et al., 1997, Methods Mol. Bio., 74, 59, and makes use of common nucleic acid protecting and coupling groups, such as dimethoxytrityl at the 5′-end, and phosphoramidites at the 3′-end. In a non-limiting example, small scale syntheses are conducted on a 394 Applied Biosystems, Inc. synthesizer using a 0.2 μmol scale protocol with a 7.5 min coupling step for alkylsilyl protected nucleotides and a 2.5 min coupling step for 2′-O-methylated nucleotides. Table II outlines the amounts and the contact times of the reagents used in the synthesis cycle. Alternatively, syntheses at the 0.2 μmol scale can be done on a 96-well plate synthesizer, such as the instrument produced by Protogene (Palo Alto, Calif.) with minimal modification to the cycle. A 33-fold excess (60 μL of 0.11 M=6.6 lmol) of 2′-O-methyl phosphoramidite and a 75-fold excess of S-ethyl tetrazole (60 μL of 0.25 M =15 μmol) can be used in each coupling cycle of 2′-O-methyl residues relative to polymer-bound 5′-hydroxyl. A 66-fold excess (120 μL of 0.11 M =13.2 μmol) of alkylsilyl (ribo) protected phosphoramidite and a 150-fold excess of S-ethyl tetrazole (120 μL of 0.25 M =30 gmol) can be used in each coupling cycle of ribo residues relative to polymer-bound 5′-hydroxyl. Average coupling yields on the 394 Applied Biosystems, Inc. synthesizer, determined by colorimetric quantitation of the trityl fractions, are typically 97.5-99%. Other oligonucleotide synthesis reagents for the 394 Applied Biosystems, Inc. 10 synthesizer include; detritylation solution is 3% TCA in methylene chloride (ABI);

[0089] capping is performed with 16% N-methyl imidazole in THF (ABI) and 10% acetic anhydride/10% 2,6-lutidine in THF (ABI); oxidation solution is 16.9 mM 12, 49 mM pyridine, 9% water in THF (PERSEPTIVET). Burdick & Jackson Synthesis Grade acetonitrile is used directly from the reagent bottle. S-Ethyltetrazole solution (0.25 M in acetonitrile) is made up from the solid obtained from American International Chemical, Inc. Alternately, for the introduction of phosphorothioate linkages, Beaucage reagent (3H-1,2-Benzodithiol-3-one 1,1-dioxide 0.05 M in acetonitrile) is used.

[0090] Deprotection of the RNA is performed using either a two-pot or one-pot protocol. For the two-pot protocol, the polymer-bound trityl-on oligoribonucleotide is transferred to a 4 mL glass screw top vial and suspended in a solution of 40% aq. methylamine (1 mL) at 65° C. for 10 min. After cooling to -20° C., the supernatant is removed from the polymer support. The support is washed three times with 1.0 mL of EtOH:MeCN:H20/3:1:1, vortexed and the supernatant is then added to the first supernatant. The combined supernatants, containing the oligoribonucleotide, are dried to a white powder. The base deprotected oligoribonucleotide is resuspended in anhydrous TEA/HF/NMP solution (300 μL of a solution of 1.5 mL N-methylpyrrolidinone, 750 μL TEA and 1 mL TEA.3HF to provide a 1.4 M HF concentration) and heated to 65° C. After 1.5 h, the oligomer is quenched with 1.5 M NH₄HCO₃.

[0091] Alternatively, for the one-pot protocol, the polymer-bound trityl-on oligoribonucleotide is transferred to a 4 mL glass screw top vial and suspended in a solution of 33% ethanolic methylamine/DMSO: 1/1 (0.8 mL) at 65° C. for 15 min.

[0092] The vial is brought to r.t. TEA3HF (0.1 mL) is added and the vial is heated at 65° C. for 15 min. The sample is cooled at −20° C. and then quenched with 1.5 M NH₄HCO₃.

[0093] For purification of the trityl-on oligomers, the quenched NH₄HCO₃ solution is loaded onto a C-18 containing cartridge that had been prewashed with acetonitrile followed by 50 mM TEAA. After washing the loaded cartridge with water, the RNA is detritylated with 0.5% TFA for 13 min. The cartridge is then washed again with water, salt exchanged with 1 M NaCl and washed with water again. The oligonucleotide is then eluted with 30% acetonitrile.

[0094] Inactive hammerhead ribozymes or binding attenuated control (BAC) oligonucleotides) are synthesized by substituting a U for G5 and a U for A14 (numbering from Hertel, K. J., et al., 1992, Nucleic Acids Res., 20, 3252). Similarly, one or more nucleotide substitutions can be introduced in other enzymatic nucleic acid molecules to inactivate the molecule and such molecules can serve as a negative control.

[0095] The average stepwise coupling yields are typically >98% (Wincott et al., 1995 Nucleic Acids Res. 23, 2677-2684). Those of ordinary skill in the art will recognize that the scale of synthesis can be adapted to be larger or smaller than the examples described above including but not limited to 96-well format, all that is important is the ratio of chemicals used in the reaction.

[0096] Alternatively, the nucleic acid molecules of the present invention can be synthesized separately and joined together post-synthetically, for example by ligation (Moore et al., 1992, Science 256, 9923; Draper et al., International PCT publication No. WO 93/23569; Shabarova et al., 1991, Nucleic Acids Research 19, 4247; Bellon et al., 1997, Nucleosides & Nucleotides, 16, 951; Bellon et al., 1997, Bioconjugate Chem. 8, 204).

[0097] The nucleic acid molecules of the present invention are modified extensively to enhance stability by modification with nuclease resistant groups, for example, 2′-amino, 2′-C-allyl, 2′-flouro, 2′-O-methyl, 2′-H (for a review see Usman and Cedergren, 1992, TIBS 17, 34; Usman et al., 1994, Nucleic Acids Symp. Ser. 31, 163). Ribozymes are purified by gel electrophoresis using general methods or are purified by high pressure liquid chromatography (HPLC; See Wincott et al., supra, the totality of which is hereby incorporated herein by reference) and are re-suspended in water.

[0098] The sequences of the ribozymes and antisense constructs that are chemically synthesized, useful in this study, are shown in Tables III to IX. Those in the art will recognize that these sequences are representative only of many more such sequences where the enzymatic portion of the ribozyme (all but the binding arms) is altered to affect activity. The ribozyme and antisense construct sequences listed in Tables III to IX may be formed of ribonucleotides or other nucleotides or non-nucleotides. Such ribozymes with enzymatic activity are equivalent to the ribozymes described specifically in the Tables.

[0099] Optimizing Activity of the Nucleic Acid Molecule of the Invention.

[0100] Chemically synthesizing nucleic acid molecules with modifications (base, sugar and/or phosphate) that prevent their degradation by serum ribonucleases may increase their potency (see e.g., Eckstein et al., International Publication No.

[0101] WO 92/07065; Perrault et al., 1990 Nature 344, 565; Pieken et al., 1991, Science 253, 314; Usman and Cedergren, 1992, Trends in Biochem. Sci. 17, 334; Usman et al., International Publication No. WO 93/15187; Rossi et al., International Publication No. WO 91/03162; Sproat, U.S. Pat. No. 5,334,711; and Burgin et al., supra; all of these describe various chemical modifications that can be made to the base, phosphate and/or sugar moieties of the nucleic acid molecules described herein. All these references are incorporated by reference herein. Modifications which enhance their efficacy in cells, and removal of bases from nucleic acid molecules to shorten oligonucleotide synthesis times and reduce chemical requirements are desired.

[0102] There are several examples in the art describing sugar, base and phosphate modifications that can be introduced into nucleic acid molecules with significant enhancement in their nuclease stability and efficacy. For example, oligonucleotides are modified to enhance stability and/or enhance biological activity by modification with nuclease resistant groups, for example, 2′-amino, 2′-C-allyl, 2′-flouro, 2′-O-methyl, 2′-H, nucleotide base modifications (for a review see Usman and Cedergren, 1992, TIBS. 17, 34; Usman et al., 1994, Nucleic Acids Symp. Ser. 31, 163; Burgin et al., 1996, Biochemistry, 35, 14090). Sugar modifications of nucleic acid molecules have been extensively described in the art (see Eckstein et al., International Publication PCT No. WO 92/07065; Perrault et al. Nature, 1990, 344, 565-568; Pieken et al. Science, 1991, 253, 314-317; Usman and Cedergren, Trends in Biochem. Sci. , 1992, 17, 334-339; Usman et al. International Publication PCT No. WO 93/15187; Sproat, U.S. Pat. No. 5,334,711 and Beigelman et al., 1995, J. Biol. Chem., 270, 25702; Beigelman et al., International PCT publication No. WO 97/26270; Beigelman et al., U.S. Pat. No. 5,716,824; Usman et al., U.S. Pat. No. 5,627,053; Woolf et al., International PCT Publication No. WO 98/13526; 35 Thompson et al., U.S. Ser. No. 60/082,404 which was filed on Apr. 20, 1998; Karpeisky et al., 1998, Tetrahedron Lett., 39, 1131; Earnshaw and Gait, 1998, Biopolymers (Nucleic acid Sciences), 48, 39-55; Verma and Eckstein, 1998, Annu. Rev. Biochem., 67, 99-134; and Burlina et al., 1997, Bioorg. Med. Chem., 5, 1999-2010; all of the references are hereby incorporated by reference herein in their totalities). Such publications describe general methods and strategies to determine the location of incorporation of sugar, base and/or phosphate modifications and the like into ribozymes without inhibiting catalysis. In view of such teachings, similar modifications can be used as described herein to modify the nucleic acid molecules of the instant invention.

[0103] While chemical modification of oligonucleotide internucleotide linkages with phosphorothioate, phosphorothioate, and/or 5′-methylphosphonate linkages improves stability, too many of these modifications may cause some toxicity. Therefore when designing nucleic acid molecules the amount of these internucleotide linkages should be minimized. The reduction in the concentration of these linkages should lower toxicity resulting in increased efficacy and higher specificity of these molecules.

[0104] Nucleic acid molecules having chemical modifications which maintain or enhance activity are provided. Such nucleic acid is also generally more resistant to nucleases than unmodified nucleic acid. Thus, in a cell and/or in vivo the activity may not be significantly lowered. Therapeutic nucleic acid molecules delivered exogenously must optimally be stable within cells until translation of the target RNA has been inhibited long enough to reduce the levels of the undesirable protein. This period of time varies between hours to days depending upon the disease state. Clearly, nucleic acid molecules must be resistant to nucleases in order to function as effective intracellular therapeutic agents. Improvements in the chemical synthesis of RNA and DNA (Wincott et al., 1995 Nucleic Acids Res. 23, 2677; Caruthers et al., 1992, Methods in Enzymology 211,3-19 (incorporated by reference herein) have expanded the ability to modify nucleic acid molecules by introducing nucleotide modifications to enhance their nuclease stability as described above.

[0105] Use of these the nucleic acid-based molecules of the invention will lead to better treatment of the disease progression by affording the possibility of combination therapies (e.g., multiple antisense or enzymatic nucleic acid molecules targeted to different genes, nucleic acid molecules coupled with known small molecule inhibitors, or intermittent treatment with combinations of molecules (including different motifs) and/or other chemical or biological molecules). The treatment of patients with nucleic acid molecules may also include combinations of different types of nucleic acid molecules.

[0106] Therapeutic nucleic acid molecules (e.g., enzymatic nucleic acid molecules and antisense nucleic acid molecules) delivered exogenously must optimally be stable within cells until translation of the target RNA has been inhibited long enough to reduce the levels of the undesirable protein. This period of time varies between hours to days depending upon the disease state. Clearly, these nucleic acid molecules must be resistant to nucleases in order to function as effective intracellular therapeutic agents. Improvements in the chemical synthesis of nucleic acid molecules described in the instant invention and in the art have expanded the ability to modify nucleic acid molecules by introducing nucleotide modifications to enhance their nuclease stability as described above.

[0107] By “enhanced enzymatic activity” is meant to include activity measured in cells and/or in vivo where the activity is a reflection of both catalytic activity and ribozyme stability. In this invention, the product of these properties is increased or not significantly (less than 10-fold) decreased in vivo compared to an all RNA ribozyme or all DNA enzyme.

[0108] In yet another preferred embodiment, nucleic acid catalysts having chemical modifications which maintain or enhance enzymatic activity are provided. Such nucleic acid is also generally more resistant to nucleases than unmodified nucleic acid. Thus, in a cell and/or in vivo the activity may not be significantly lowered. As exemplified herein such ribozymes are useful in a cell and/or in vivo even if activity over all is reduced 10 fold (Burgin et al., 1996, Biochemistry, 35, 14090). Such ribozymes herein are said to “maintain” the enzymatic activity of an all RNA ribozyme.

[0109] In another aspect the nucleic acid molecules comprise a 5′ and/or a 3′-cap structure.

[0110] By “cap structure” is meant chemical modifications, which have been incorporated at either terminus of the oligonucleotide (see, for example, Wincott et al., WO 97/26270, incorporated by reference herein). These terminal modifications protect the nucleic acid molecule from exonuclease degradation, and may help in delivery and/or localization within a cell. The cap may be present at the 5′-terminus (5′-cap) or at the 3′-terminus (3′-cap) or may be present on both termini. In non-limiting examples the 5′-cap is selected from the group comprising inverted abasic residue (moiety), 4′,5′-methylene nucleotide; 1-(beta-D-erythrofuranosyl) nucleotide, 4′-thio nucleotide, carbocyclic nucleotide; 1,5-anhydrohexitol nucleotide; L-nucleotides; alpha-nucleotides; modified base nucleotide; phosphorodithioate linkage; threo-pentofuranosyl nucleotide; acyclic 3′,4′-seco nucleotide; acyclic 3,4-dihydroxybutyl nucleotide; acyclic 3,5-dihydroxypentyl nucleotide, 3′-3′-inverted nucleotide moiety; 3′-3′-inverted abasic moiety; 3′-2′-inverted nucleotide moiety; 3′-2′-inverted abasic moiety; 1,4-butanediol phosphate; 3′-phosphoramidate; hexylphosphate; aminohexyl phosphate; 3′-phosphate; 3′-phosphorothioate; phosphorodithioate; or bridging or non-bridging methylphosphonate moiety (for more details see Wincott et al., International PCT publication No. WO 97/26270, incorporated by reference herein).

[0111] In yet another preferred embodiment, the 3′-cap is selected from a group comprising, 4′,5′-methylene nucleotide; 1-(beta-D-erythrofuranosyl) nucleotide; 4′-thio nucleotide, carbocyclic nucleotide; 5′-amino-alkyl phosphate; 1,3-diamino-2-propyl phosphate, 3-aminopropyl phosphate; 6-aminohexyl phosphate; 1,2-aminododecyl phosphate; hydroxypropyl phosphate; 1,5-anhydrohexitol nucleotide; L-nucleotide; alpha-nucleotide; modified base nucleotide; phosphorodithioate; threo-pentofuranosyl nucleotide; acyclic 3′,4′-seco nucleotide; 3,4-dihydroxybutyl nucleotide; 3,5-dihydroxypentyl nucleotide, 5′-5′-inverted nucleotide moiety; 5′-5′-inverted abasic moiety; 5′-phosphoramidate; 5′-phosphorothioate; 1,4-butanediol phosphate; 5′-amino; bridging and/or non-bridging 5′-phosphoramidate, phosphorothioate and/or phosphorodithioate, bridging or non bridging methylphosphonate and 5′-mercapto moieties (for more details, see Beaucage and Iyer, 1993, Tetrahedron 49, 1925; incorporated by reference herein).

[0112] By the term “non-nucleotide” is meant any group or compound which can be incorporated into a nucleic acid chain in the place of one or more nucleotide units, including either sugar and/or phosphate substitutions, and allows the remaining bases to exhibit their enzymatic activity. The group or compound is abasic in that it does not contain a commonly recognized nucleotide base, such as adenosine, guanine, cytosine, uracil or thymine.

[0113] An “alkyl” group refers to a saturated aliphatic hydrocarbon, including straight-chain, branched-chain, and cyclic alkyl groups. Preferably, the alkyl group has 1 to 12 carbons. More preferably it is a lower alkyl of from 1 to 7 carbons, more preferably 1 to 4 carbons. The alkyl group may be substituted or unsubstituted. When substituted the substituted group(s) is preferably, hydroxyl, cyano, alkoxy, ═O, ═S, NO₂ or N(CH₃)₂, amino, or SH. The term also includes alkenyl groups which are unsaturated hydrocarbon groups containing at least one carbon-carbon double bond, including straight-chain, branched-chain, and cyclic groups. Preferably, the alkenyl group has 1 to 12 carbons. More preferably it is a lower alkenyl of from 1 to 7 carbons, more preferably 1 to 4 carbons. The alkenyl group may be substituted or unsubstituted. When substituted the substituted group(s) is preferably, hydroxyl, cyano, alkoxy, ═O, ═S, NO₂, halogen, N(CH3)₂, amino, or SH. The term “alkyl” also includes alkynyl groups which have an unsaturated hydrocarbon group containing at least one carbon-carbon triple bond, including straight-chain, branched-chain, and cyclic groups. Preferably, the alkynyl group has 1 to 12 carbons. More preferably it is a lower alkynyl of from 1 to 7 carbons, more preferably 1 to 4 carbons. The alkynyl group may be substituted or unsubstituted. When substituted the substituted group(s) is preferably, hydroxyl, cyano, alkoxy, ═O, ═S, NO₂ or N(CH₃)₂, amino or SH.

[0114] Such alkyl groups may also include aryl, alkylaryl, carbocyclic aryl, heterocyclic aryl, amide and ester groups. An “aryl” group refers to an aromatic group which has at least one ring having a conjugated π electron system and includes carbocyclic aryl, heterocyclic aryl and biaryl groups, all of which may be optionally substituted. The preferred substituent(s) of aryl groups are halogen, trihalomethyl, hydroxyl, SH, OH, cyano, alkoxy, alkyl, alkenyl, alkynyl, and amino groups. An “alkylaryl” group refers to an alkyl group (as described above) covalently joined to an aryl group (as described above). Carbocyclic aryl groups are groups wherein the ring atoms on the aromatic ring are all carbon atoms. The carbon atoms are optionally substituted. Heterocyclic aryl groups are groups having from 1 to 3 heteroatoms as ring atoms in the aromatic ring and the remainder of the ring atoms are carbon atoms. Suitable heteroatoms include oxygen, sulfur, and nitrogen, and include furanyl, thienyl, pyridyl, pyrrolyl, N-lower alkyl pyrrolo, pyrimidyl, pyrazinyl, imidazolyl and the like, all optionally substituted. An “amide” refers to an —C(O)—NH—R, where R is either alkyl, aryl, alkylaryl or hydrogen. An “ester” refers to an —C(O)—OR′, where R is either alkyl, aryl, alkylaryl or hydrogen.

[0115] By “nucleotide” as used herein is as recognized in the art to include natural bases (standard), and modified bases well known in the art. Such bases are generally located at the 1′ position of a nucleotide sugar moiety. Nucleotides generally comprise a base, sugar and a phosphate group. The nucleotides can be unmodified or modified at the sugar, phosphate and/or base moiety, (also referred to interchangeably as nucleotide analogs, modified nucleotides, non-natural nucleotides, non-standard nucleotides and other; see for example, Usman and McSwiggen, supra; Eckstein et al., International PCT Publication No. WO 92/07065; Usman et al., International PCT Publication No. WO 93/15187; Uhlmann & Peyman, 1990, Chemical Reviews, 90, 4, 544-579, all are hereby incorporated by reference herein). There are several examples of modified nucleic acid bases known in the art as summarized by Limbach et al., 1994, Nucleic Acids Res. 22, 2183. Some of the non-limiting examples of base modifications that can be introduced into nucleic acid molecules include, inosine, purine, pyridin-4-one, pyridin-2-one, phenyl, pseudouracil, 2,4,6-trimethoxy benzene, 3-methyl uracil, dihydrouridine, naphthyl, aminophenyl, 5-alkylcytidines (e.g., 5-methylcytidine), 5-alkyluridines (e.g., ribothymidine), 5-halouridine (e.g., 5-bromouridine) or 6-azapyrimidines or 6-alkylpyrimidines (e.g. 6-methyluridine), propyne, and others (Burgin et al., 1996, Biochemistry, 35, 14090; Uhlman & Peyman, supra). By “modified bases” in this aspect is meant nucleotide bases other than adenine, guanine, cytosine and uracil at 1′ position or their equivalents; such bases may be used at any position, for example, within the catalytic core of an enzymatic nucleic acid molecule and/or in the substrate-binding regions of the nucleic acid molecule.

[0116] In a preferred embodiment, the invention features modified ribozymes with phosphate backbone modifications comprising one or more phosphorothioate, phosphorodithioate, methylphosphonate, morpholino, amidate carbamate, carboxymethyl, acetamidate, polyamide, sulfonate, sulfonamide, sulfamate, fornacetal, thioformacetal, and/or alkylsilyl, substitutions. For a review of oligonucleotide backbone modifications see Hunziker and Leumann, 1995, Nucleic Acid Analogues: Synthesis and Properties, in Modern Synthetic Methods, VCH, 331-417, and Mesmaeker et al., 1994, Novel Backbone Replacements for Oligonucleotides, in Carbohydrate Modifications in Antisense Research, ACS, 24-39. These references are hereby incorporated by reference herein.

[0117] By “abasic” is meant sugar moieties lacking a base or having other chemical groups in place of a base at the 1′ position, (for more details, see Wincott et al., International PCT publication No. WO 97/26270).

[0118] By “unmodified nucleoside” is meant one of the bases adenine, cytosine, guanine, thymine, uracil joined to the 1′ carbon of P-D-ribo-furanose.

[0119] By “modified nucleoside” is meant any nucleotide base which contains a modification in the chemical structure of an unmodified nucleotide base, sugar and/or phosphate.

[0120] In connection with 2′-modified nucleotides as described for the present invention, by “amino” is meant 2′-NH₂ or 2′-O—NH₂, which may be modified or unmodified. Such modified groups are described, for example, in Eckstein et al., U.S. Pat. No. 5,672,695 and Matulic-Adamic et al., WO 98/28317, respectively, which are both incorporated by reference herein in their entireties.

[0121] Various modifications to nucleic acid (e.g., antisense and ribozyme) structure can be made to enhance the utility of these molecules. Such modifications will enhance shelf-life, half-life in vitro, stability, and ease of introduction of such oligonucleotides to the target site, e.g., to enhance penetration of cellular membranes, and confer the ability to recognize and bind to targeted cells.

[0122] Use of these molecules will lead to better treatment of the disease progression by affording the possibility of combination therapies (e.g., multiple ribozymes targeted to different genes, ribozymes coupled with known small molecule inhibitors, or intermittent treatment with combinations of ribozymes (including different ribozyme motifs) and/or other chemical or biological molecules). The treatment of patients with nucleic acid molecules may also include combinations of different types of nucleic acid molecules. Therapies may be devised which include a mixture of ribozymes (including different ribozyme motifs), antisense and/or 2-5A chimera molecules to one or more targets to alleviate symptoms of a disease.

[0123] Administration of Nucleic Acid Molecules

[0124] Methods for the delivery of nucleic acid molecules are described in Akhtar et al., 1992, Trends Cell Bio., 2, 139; and Delivery Strategies for Antisense Oligonucleotide Therapeutics, ed. Akhtar, 1995 which are both incorporated herein by reference. Sullivan et al., PCT WO 94/02595, further describes the general methods for delivery of enzymatic RNA molecules. These protocols may be utilized for the delivery of virtually any nucleic acid molecule. Nucleic acid molecules may be administered to cells by a variety of methods known to those familiar to the art, including, but not restricted to, encapsulation in liposomes, by iontophoresis, or by incorporation into other vehicles, such as hydrogels, cyclodextrins, biodegradable nanocapsules, and bioadhesive microspheres. For some indications, nucleic acid molecules may be directly delivered ex vivo to cells or tissues with or without the aforementioned vehicles. Alternatively, the nucleic acid/vehicle combination is locally delivered by direct injection or by use of a catheter, infusion pump or stent. Other routes of delivery include, but are not limited to, intravascular, intramuscular, subcutaneous or joint injection, aerosol inhalation, oral (tablet or pill form), topical, systemic, ocular, intraperitoneal and/or intrathecal delivery. More detailed descriptions of nucleic acid delivery and administration are provided in Sullivan et al., supra, Draper et al, PCT WO93/23569, Beigelman et al., PCT W099/05094, and Klimuk et al., PCT WO99/04819 all of which have been incorporated by reference herein.

[0125] In addition, the nucleic acid molecules of the instant invention, used to treat pulmonary diseases and disorders, may be administered directly to the lungs via pulmonary delivery. The pulmonary delivery of oligonucleotides is described by Bennett et al., International PCT publication Nos. WO/9960166 and WO/9960010; Danahay et al., 1999, Pharm. Res., 16(10), 1542-1549; Metzger and Nyce, 1999, J. Allergy Clin. Immunol., 104(2, Pt. 1), 260-266; Nicklin et al., 1998, Pharm. Res., 15(4), 583-591; Illum and Watts, International PCT publication No. WO/9735562; and Nyce, 1997, Expert Opin. Invest. Drugs, 6(9), 1149-1156.

[0126] The molecules of the instant invention can be used as pharmaceutical agents. Pharmaceutical agents prevent, inhibit the occurrence, or treat (alleviate a symptom to some extent, preferably all of the symptoms) of a disease state in a patient.

[0127] The negatively charged polynucleotides of the invention can be administered (e.g., RNA, DNA or protein) and introduced into a patient by any standard means, with or without stabilizers, buffers, and the like, to form a pharmaceutical composition. When it is desired to use a liposome delivery mechanism, standard protocols for formation of liposomes can be followed. The compositions of the present invention may also be formulated and used as tablets, capsules or elixirs for oral administration; suppositories for rectal administration; sterile solutions; suspensions for injectable administration; and other compositions known in the art. The present invention also includes pharmaceutically acceptable formulations of the compounds described. These formulations include salts of the above compounds, e.g., acid addition salts, including salts of hydrochloric, hydrobromic, acetic acid, and benzene sulfonic acid.

[0128] A pharmacological composition or formulation refers to a composition or formulation in a form suitable for administration, e.g., systemic administration, into a cell or patient, preferably a human. Suitable forms, in part, depend upon the use or the route of entry, for example oral, transdermal, or by injection. Such forms should not prevent the composition or formulation from reaching a target cell (i.e., a cell to which the negatively charged polymer is desired to be delivered to). For example, pharmacological compositions injected into the blood stream should be soluble.

[0129] Other factors are known in the art, and include considerations such as toxicity and forms which prevent the composition or formulation from exerting its effect. By “systemic administration” is meant in vivo systemic absorption or accumulation of drugs in the blood stream followed by distribution throughout the entire body. Administration routes that lead to systemic absorption include, without limitations: intravenous, subcutaneous, intraperitoneal, inhalation, oral, intrapulmonary and intramuscular. Each of these administration routes exposes the desired negatively charged polymers, e.g., nucleic acids, to an accessible diseased tissue. The rate of entry of a drug into the circulation has been shown to be a function of molecular weight or size. The use of a liposome or other drug carrier comprising the compounds of the instant invention can potentially localize the drug, for example, in certain tissue types, such as the tissues of the reticular endothelial system (RES). A liposome formulation that can facilitate the association of drug with the surface of cells, such as, lymphocytes and macrophages is also useful. This approach may provide enhanced delivery of the drug to target cells by taking advantage of the specificity of macrophage and lymphocyte immune recognition of abnormal cells, such as cancer cells.

[0130] By pharmaceutically acceptable formulation is meant, a composition or formulation that allows for the effective distribution of the nucleic acid molecules of the instant invention in the physical location most suitable for their desired activity.

[0131] Non-limiting examples of agents suitable for formulation with the nucleic acid molecules of the instant invention include: P-glycoprotein inhibitors (such as Pluronic P85) which can enhance entry of drugs into the CNS (Jolliet-Riant and Tillement, 1999, Fundam. Clin. Pharmacol., 13, 16-26); biodegradable polymers, such as poly (DL-lactide-coglycolide) microspheres for sustained release delivery after intracerebral implantation (Emerich, DF et al, 1999, Cell Transplant, 8, 47-58) Alkermes, Inc. Cambridge, Mass.; and loaded nanoparticles, such as those made of polybutylcyanoacrylate, which can deliver drugs across the blood brain barrier and can alter neuronal uptake mechanisms (Prog Neuropsychopharmacol Biol Psychiatry, 23, 941-949, 1999). Other non-limiting examples of delivery strategies for the nucleic acid molecules of the instant invention include material described in Boado et al., 1998, J. Pharm. Sci., 87, 1308-1315; Tyler et al., 1999, FEBS Lett., 421, 280-284; Pardridge et al., 1995, PNAS USA., 92, 5592-5596; Boado, 1995, Adv. Drug Delivery Rev., 15, 73-107; Aldrian-Herrada et al., 1998, Nucleic Acids Res., 26, 4910-4916; and Tyler et al., 1999, PNAS USA., 96, 7053-7058.

[0132] The invention also features the use of the composition comprising surface-modified liposomes containing poly (ethylene glycol) lipids (PEG-modified, or long-circulating liposomes or stealth liposomes). These formulations offer a method for increasing the accumulation of drugs in target tissues. This class of drug carriers resists opsonization and elimination by the mononuclear phagocytic system (MPS or RES), thereby enabling longer blood circulation times and enhanced tissue exposure for the encapsulated drug (Lasic et al. Chem. Rev. 1995, 95, 2601-2627; Ishiwata et al., Chem. Pharm. Bull. 1995, 43, 1005-1011 ). All incorporated by reference herein. Such liposomes have been shown to accumulate selectively in tumors, presumably by extravasation and capture in the neovascularized target tissues (Lasic et al., Science 1995, 267, 1275-1276; Oku et al., 1995, Biochim. Biophys. Acta, 1238, 86-90). All incorporated by reference herein. The long-circulating liposomes enhance the pharmacokinetics and pharmacodynamics of DNA and RNA, particularly compared to conventional cationic liposomes which are known to accumulate in tissues of the MPS (Liu et al., J. Biol. Chem. 1995, 42, 24864-24870; Choi et al., International PCT Publication No. WO 96/10391; Ansell et al., International PCT Publication No. WO 96/10390; Holland et al., International PCT Publication No. WO 96/10392; all of which are incorporated by reference herein). Long-circulating liposomes are also likely to protect drugs from nuclease degradation to a greater extent compared to cationic liposomes, based on their ability to avoid accumulation in metabolically aggressive MPS tissues such as the liver and spleen.

[0133] In addition, the invention features the use of methods to deliver the nucleic acid molecules of the instant invention to hematopoietic cells, including monocytes and lymphocytes. These methods are described in detail by Hartmann et al., 1998, J. Phamacol. Exp. Ther., 285(2), 920-928; Kronenwett et al., 1998, Blood, 91(3), 852-862; Filion and Phillips, 1997, Biochim. Biophys. Acta., 1329(2), 345-356; Ma and Wei, 1996, Leuk. Res., 20(11/12), 925-930; and Bongartz et al., 1994, Nucleic Acids Research, 22(22), 4681-8. Such methods, as described above, include the use of free oligonucleotide, cationic lipid formulations, liposome formulations including pH sensitive liposomes and immunoliposomes, and bioconjugates including oligonucleotides conjugated to fusogenic peptides, for the transfection of hematopoietic cells with oligonucleotides.

[0134] The present invention also includes compositions prepared for storage or administration which include a pharmaceutically effective amount of the desired compounds in a pharmaceutically acceptable carrier or diluent. Acceptable carriers or diluents for therapeutic use are well known in the pharmaceutical art, and are described, for example, in Remington's Pharmaceutical Sciences, Mack Publishing Co. (A. R. Gennaro edit. 1985) hereby incorporated by reference herein. For example, preservatives, stabilizers, dyes and flavoring agents may be provided. These include sodium benzoate, sorbic acid and esters of p-hydroxybenzoic acid. In addition, antioxidants and suspending agents may be used.

[0135] A pharmaceutically effective dose is that dose required to prevent, inhibit the occurrence, or treat (alleviate a symptom to some extent, preferably all of the symptoms) of a disease state. The pharmaceutically effective dose depends on the type of disease, the composition used, the route of administration, the type of mammal being treated, the physical characteristics of the specific mammal under consideration, concurrent medication, and other factors which those skilled in the medical arts will recognize. Generally, an amount between 0.1 mg/kg and 100 mg/kg body weight/day of active ingredients is administered dependent upon potency of the negatively charged polymer.

[0136] The nucleic acid molecules of the present invention may also be administered to a patient in combination with other therapeutic compounds to increase the overall therapeutic effect. The use of multiple compounds to treat an indication may increase the beneficial effects while reducing the presence of side effects. Oxygen therapy, bronchodilators, corticosteroids, antibacterials, vaccinations, acetylcysteine, mucokinetic agents, and DNase (Pulmozyme) are non-limiting examples of compounds and/or methods that can be combined with or used in conjunction with the nucleic acid molecules (e.g. ribozymes and antisense molecules) of the instant invention. Those skilled in the art will recognize that other drug compounds and therapies can be similarly and readily combined with the nucleic acid molecules of the instant invention (e.g. ribozymes and antisense molecules) and are, therefore, within the scope of the instant invention. Alternatively, certain of the nucleic acid molecules of the instant invention can be expressed within cells from eukaryotic promoters (e.g., Izant and Weintraub, 1985, Science, 229, 345; McGarry and Lindquist, 1986, Proc. Natl. Acad. Sci., USA 83, 399; Scanlon et al., 1991, Proc. Natl. Acad. Sci. USA, 88, 10591-5; Kashani-Sabet et al., 1992, Antisense Res. Dev., 2, 3-15; Dropulic et al., 1992, J Virol., 66, 1432-41; Weerasinghe et al., 1991, J. Virol., 65, 5531-4; Ojwang et al., 1992, Proc. Natl. Acad. Sci. USA, 89, 10802-6; Chen et al., 1992, Nucleic Acids Res., 20, 4581-9; Sarver et al., 1990 Science, 247, 1222-1225; Thompson et al., 1995, Nucleic Acids Res., 23, 2259; Good et al., 1997, Gene Therapy, 4, 45; all of the references are hereby incorporated in their totality by reference herein). Those skilled in the art realize that any nucleic acid can be expressed in eukaryotic cells from the appropriate DNA/RNA vector. The activity of such nucleic acids can be augmented by their release from the primary transcript by a ribozyme (Draper et al., PCT WO 93/23569, and Sullivan et al., PCT WO 94/02595; Ohkawa et al., 1992, Nucleic Acids Symp. Ser., 27, 15-6; Taira et al., 1991, Nucleic Acids Res., 19, 5125-30; Ventura et al., 1993, Nucleic Acids Res., 21, 3249-55; Chowrira et al., 1994, J. Biol. Chem., 269, 25856; all of these references are hereby incorporated in their totalities by reference herein).

[0137] In another aspect of the invention, RNA molecules of the present invention are preferably expressed from transcription units (see, for example, Couture et al., 1996, TIG., 12, 510) inserted into DNA or RNA vectors. The recombinant vectors are preferably DNA plasmids or viral vectors. Ribozyme expressing viral vectors could be constructed based on, but not limited to, adeno-associated virus, retrovirus, adenovirus, or alphavirus. Preferably, the recombinant vectors capable of expressing the nucleic acid molecules are delivered as described above, and persist in target cells. Alternatively, viral vectors may be used that provide for transient expression of nucleic acid molecules. Such vectors might be repeatedly administered as necessary. Once expressed, the nucleic acid molecule binds to the target mRNA. Delivery of nucleic acid molecule expressing vectors could be systemic, such as by intravenous or intramuscular administration, by administration to target cells explanted from the patient followed by reintroduction into the patient, or by any other means that would allow for introduction into the desired target cell (for a review, see Couture et al., 1996, TIG., 12,510).

[0138] In one aspect, the invention features an expression vector comprising a nucleic acid sequence encoding at least one of the nucleic acid molecules disclosed in the instant invention. The nucleic acid sequence encoding the nucleic acid molecule of the instant invention is operably linked in a manner which allows expression of that nucleic acid molecule.

[0139] In another aspect, the invention features an expression vector comprising: a) a transcription initiation region (e.g., eukaryotic pol I, II or Ell initiation region); b) a transcription termination region (e.g., eukaryotic pol I, II or III termination region); c) a nucleic acid sequence encoding at least one of the nucleic acid catalyst of the instant invention; and wherein said sequence is operably linked to said initiation region and said termination region, in a manner which allows expression and/or delivery of said nucleic acid molecule. The vector may optionally include an open reading frame (ORF) for a protein operably linked on the 5′ side or the 3′-side of the sequence encoding the nucleic acid catalyst of the invention; and/or an intron (intervening sequences).

[0140] Transcription of the nucleic acid molecule sequences are driven from a promoter for eukaryotic RNA polymerase I (pol I), RNA polymerase II (pol II), or RNA polymerase III (pol III). Transcripts from pol II or pol HI promoters will be expressed at high levels in all cells; the levels of a given pol II promoter in a given cell type will depend on the nature of the gene regulatory sequences (enhancers, silencers, etc.) present nearby. Prokaryotic RNA polymerase promoters are also used, providing that the prokaryotic RNA polymerase enzyme is expressed in the appropriate cells (Elroy-Stein and Moss, 1990, Proc. Natl. Acad. Sci. USA, 87, 6743-7; Gao and Huang 1993, Nucleic Acids Res., 21, 2867-72; Lieber et al., 1993, Methods Enzymol., 217, 47-66; Zhou et al., 1990, Mol. Cell. Biol., 10, 4529-37). All of these references are incorporated by reference herein.

[0141] Several investigators have demonstrated that nucleic acid molecules, such as ribozymes expressed from such promoters can function in mammalian cells (e.g. Kashani-Sabet et al., 1992, Antisense Res. Dev., 2, 3-15; Ojwang et al., 1992, Proc. Natl. Acad. Sci. USA, 89, 10802-6; Chen et al., 1992, Nucleic Acids Res., 20, 4581-9; Yu et al., 1993, Proc. Natl. Acad. Sci. USA, 90, 6340-4; L'Huillier et al., 1992, EMBO J., 11, 4411-8; Lisziewicz et al., 1993, Proc. Natl. Acad. Sci. U.S.A, 90, 8000-4; Thompson et al., 1995, Nucleic Acids Res., 23, 2259; and Sullenger & Cech, 1993, Science, 262, 1566). More specifically, transcription units such as the ones derived from genes encoding U6 small nuclear (snRNA), transfer RNA (tRNA) and adenovirus VA RNA are useful in generating high concentrations of desired RNA molecules such as ribozymes in cells (Thompson et al., supra; Couture and Stinchcomb, 1996, supra; Noonberg et al, 1994, Nucleic Acid Res., 22, 2830; Noonberg et al, U.S. Pat. No. 5,624,803; Good et al., 1997, Gene Ther., 4, 45; and Beigelman et al., International PCT Publication No. WO 96/18736; all of these publications are incorporated by reference herein. The above ribozyme transcription units can be incorporated into a variety of vectors for introduction into mammalian cells, including but not restricted to, plasmid DNA vectors, viral DNA vectors (such as adenovirus or adeno-associated virus vectors), or viral RNA vectors (such as retroviral or alphavirus vectors) (for a review, see Couture and Stinchcomb, 1996, supra).

[0142] In yet another aspect, the invention features an expression vector comprising a nucleic acid sequence encoding at least one of the nucleic acid molecules of the invention, in a manner which allows expression of that nucleic acid molecule. The expression vector comprises in one embodiment; a) a transcription initiation region; b) a transcription termination region; c) a nucleic acid sequence encoding at least one said nucleic acid molecule; and wherein said sequence is operably linked to said initiation region and said termination region, in a manner which allows expression and/or delivery of said nucleic acid molecule.

[0143] In another preferred embodiment, the expression vector comprises: a) a transcription initiation region; b) a transcription termination region; c) an open reading frame; d) a nucleic acid sequence encoding at least one said nucleic acid molecule, wherein said sequence is operably linked to the 3′-end of said open reading frame; and wherein said sequence is operably linked to said initiation region, said open reading frame and said termination region, in a manner which allows expression and/or delivery of said nucleic acid molecule.

[0144] In yet another embodiment the expression vector comprises: a) a transcription initiation region; b) a transcription termination region; c) an intron; d) a nucleic acid sequence encoding at least one said nucleic acid molecule; and wherein said sequence is operably linked to said initiation region, said intron and said termination region, in a manner which allows expression and/or delivery of said nucleic acid molecule.

[0145] In another embodiment, the expression vector comprises: a) a transcription initiation region; b) a transcription termination region; c) an intron; d) an open reading frame; e) a nucleic acid sequence encoding at least one said nucleic acid molecule, wherein said sequence is operably linked to the 3′-end of said open reading frame; and wherein said sequence is operably linked to said initiation region, said intron, said open reading frame and said termination region, in a manner which allows expression and/or delivery of said nucleic acid molecule.

### EXAMPLES

[0146] The following are non-limiting examples showing the selection, isolation, synthesis and activity of nucleic acids of the instant invention.

[0147] The following examples demonstrate the selection and design of Antisense, hammerhead, DNAzyme, NCH, Amberzyme, Zinzyme, or G-Cleaver ribozyme molecules and binding/cleavage sites within CLCA1 RNA.

### Example 1

### Reporter System

[0148] Applicant used a target discovery and target validation approach to finding genes that are involved in chronic mucous hypersecretion. In order to discover genes playing a role in the expression of mucins, a readily assayable reporter system was devised. The reporter system consists of a plasmid construct, termed pMUC5AC-EGFP, bearing a gene coding for Green Fluorescent Protein (GFP). The promoter region of the GFP gene is replaced by a portion of the Mucin 5AC promoter sufficient to direct efficient transcription of the GFP gene. The plasmid also contains the neomycin drug resistance gene.

### Example 2

### Host Cell Line for Target Discovery

[0149] The cell line selected as host for these studies, NCI-H292 (ATCC CRL-1848), is derived from a human lung mucoepidermoid carcinoma. The cells retain mucoepidermoid characteristics in culture and endogenously express mucin 5AC and mucin 2. The pMUC5AC-EGFP plasmid was transfected into NCI-H292 using a cationic lipid formulation. Following transfection, the cells were subjected to limiting dilution cloning under selection by 600 μg/mL Geneticin. Cells retaining the pMUC5AC-EGFP plasmid survive the Geneticin treatment and form colonies derived from single surviving cells. The resulting clonal cell lines were screened by flow cytometry for the capacity to upregulate GFP production directed by the Mucin 5AC promoter. Treating the cells with sterilized M9 bacterial medium in which Pseudomonas aeruginosa had been cultured (Pseudomonas conditioned medium, PCM) induced the mucin promoter. The PCM is supplemented with phorbol myristate acetate (PMA).

[0150] A clonal cell line highly responsive to mucin promoter induction, designated H292/MUC5AC/EGFP Clone8 (H292 Clone 8) was selected as the reporter line for subsequent studies. The process for Target Discovery is described in Jarvis et al., International PCT publication No. WO 98/50530, incorporated by reference herein in its entirety including the Figures.

### Example 3

### Ribozyme Library Construction

[0151] A ribozyme library was constructed with oligonucletides containing ribozymes with two randomized regions comprising six-nucleotide binding “arms” (Stem I and Stem HI of a ribozyme-substrate complex). Oligo sequence 5′ and 3′ of the ribozyme contains restriction endonuclease cleavage sites for cloning. The 3′ trailing sequence forms a stem-loop for priming DNA polymerase extension to form a double stranded molecule. The double-stranded ribozyme library was cloned into the U6+27 transcription unit located in the 5′ LTR region of a retroviral vector containing the human nerve growth factor receptor (hNGFr) reporter gene.

[0152] Positioning the U6+27/ribozyme transcription unit in the 5′ LTR results in a duplication of the transcription unit when the vector integrates into the host cell genome. As a result, the ribozyme is transcribed by RNA polymerase HI from U6+27 and by RNA polymerase II activity directed by the 5′ LTR. The ribozyme library was packaged into retroviral particles that were used to infect and transduce H292 Clone 8 cells. Assay of the hNGFr reporter indicated that 50% to 60% of Clone 8 cells incorporated the ribozyme construct. FIGS. 5A and 5B describe the generalized scheme used in the ribozyme library construction and target discovery. By “randomized region” is meant a region of completely random sequence and/or partially random sequence. By completely random sequence is meant a sequence wherein theoretically there is equal representation of A, T, G and C nucleotides or modified derivatives thereof, at each position in the sequence. By partially random sequence is meant a sequence wherein there is an unequal representation of A, T, G and C nucleotides or modified derivatives thereof, at each position in the sequence. A partially random sequence can therefore have one or more positions of complete randomness and one or more positions with defined nucleotides.

### Example 4

### Enriching for Non-responders to Mucin Induction

[0153] Sorting of ribozyme library-containing cells was performed to enrich for cells that produce less GFP after treatment with PCM and PMA. Lower GFP production may be due to ribozyme action upon genes involved in the activation of the mucin promoter. Alternatively, ribozymes may directly target the mucin/GFP transcript resulting in reduced GFP expression.

[0154] Cells were seeded at a density of 1×10⁶ per 150 cm² style cell culture flasks. After 72 hours the standard cell culture medium was replaced with medium without fetal bovine serum. After 24 hours of serum deprivation the cells were treated with serum-containing medium supplemented with PCM (to 40%) and PMA (to 50 nM) to induced GFP production via the mucin promoter. After 20 to 22 hours, cells were monitored for GFP level on a FACStar Plus cell sorter.

[0155] Sorting was performed if 90% of ribozyme library cells from an unsorted control sample were induced to produce GFP above background levels. Two cell fractions were collected in each round of sorting.

[0156] In the initial sort the M1 gate collected cells in luminescence channels 1 to 4.5; those cells with the lowest GFP signal (5% of the induced population). The M2 sort gate collected cells in luminescence channels 4.5 to 20; cells with low GFP signal (10% of the induced population). The M1 and M2 fractions together represented the 15% of the induced population responding least to the GFP induction treatment. In order to assure that the diversity of the ribozyme library was represented 2.3×10⁶ cells were collected in the M1 fraction and 4.6×10⁶ cells were collected in the M2 fraction. The M1 and M2 fractions wee cultured separately and representative portions of each were cryopreserved after each round of sorting.

[0157] When treated with PCM and PMA prior to a second round of sorting, cells from both the M1 and M2 fractions responded as before with >90% of the cells producing elevated levels of GFP. The same sorting criteria and sort gates were used in the second round. As in the first round of sorting the M1 sort gate collected 5% of the treated cells (those with little or no GFP) and the M2 gate collected 10% of the cells. Two more rounds of sorting were performed using the same sorting criteria.

[0158] Prior to the third round of sorting the M1 fraction showed a three-fold enrichment of GFP negative cells. Prior to the fourth round of sorting both the M1 and M2 fractions were significantly enriched in cells unresponsive to the GFP induction treatment.

[0159] Following the third round of sorting the M1 fraction was selected to generate a database of ribozymes present in the sorted cells.

### Example 5

### Recovery of Ribozyme Sequence from Sorted Cells

[0160] Genomic DNA was obtained from sorted ribozyme library cells by standard methods. Nested polymerase chain reaction (PCR) primers (Sequence ID Nos. 5468 and 5469) that hybridized to the retroviral vector 5′ and 3′ of the ribozyme were used to recover and amplify the ribozyme sequences from the Clone 8 library cell DNA. The PCR product was ligated into a bacterial cloning vector. Two methods were developed to use the recovered ribozyme library, in plasmid form, to generate a database of ribozyme binding arm sequences. In the first approach the library was cloned into E. coli. DNA was prepared by plasmid isolation from bacterial colonies or by direct colony PCR and ribozyme arm sequence was determined. Over 450 sequences have been obtained by this method. A second method used the ribozyme library to transfect H292 Clone 8 cells. Clonal lines of stably transfected cells were established and induced with PCM and PMA. Those lines which failed to respond to GFP induction were probed by PCR for single ribozyme integration events. Over 300 sequences were obtained in this manner. The unique ribozyme sequences obtained by both methods were added to a Target Sequence Tag (TST) database.

### Example 6

### Bioinformatics

[0161] After sequencing 760 recovered ribozymes 171 unique sequences were found. Of the unique sequences, 91 have been recovered once and 80 have been found multiple times. Most of the repeated sequences have been found 2 to 11 times. One sequence has been recovered 145 times. The diversity of the sequences obtained indicates that the sorted cells are a promising source of information leading to target discovery.

[0162] Ribozyme binding arm sequences were compared to public and private gene data banks. Gene matches were compiled according to perfect and imperfect matches. Potential gene targets were categorized by the number of different ribozyme sequences matching each gene. Multiple ribozyme matches have been found for 180 genes. Genes with more than one perfect ribozyme match were given close attention. A total of 34 genes have been verified to date to have multiple perfect ribozyme matches. Of those at least 17 have protein products of known function.

[0163] Two perfect ribozyme matches were found for human calcium activated chloride channel-1 (hCLCA1). Each ribozyme matches at two sites in the hCLCA1 gene. A third sorted library ribozyme sequence “hits” hCLCA1 but has a single nucleotide mismatch.

### Example 7

### Selection of hCLCA1 for Validation

[0164] The selection of hCLCA1 as a candidate for target validation was based on bioinformatics and on emerging data in murine models of mucous hypersecretion in the trachea and lung. Two ribozymes (Seq. ID Nos. 2332 and 2273) recovered from cells that no longer respond to mucin promoter/GFP induction match perfectly to hCLCA1. A third has a single mismatch. Evidence from two murine models indicates a correlation between mucous hypersecretion in the lung and strong upregulation of gob-5 (GenBank ABO17156), a murine homologue of hCLCA1.

### Example 8

### Validation of hCLCA1

[0165] To validate hCLCA1 as a regulator of MUC5AC expression, GeneBloc reagents were designed (Table IX) to the hCLCA1 cDNA sequence (GenBank AF039400). GeneBloc reagents are complexed with a cationic lipid formulation prior to administration to H292/MUC5AC/GFP Clone 8 cells. Concentrations of the GeneBloc reagents administered range from 30 nM to 120 nM at cationic lipid concentrations of 4-6 μg/mL. Cells are treated with GeneBloc reagents for 72 to 96 30 hours. Before the termination of GeneBloc treatment, PCM (to 40 %) and PMA (to 50 nM) are added to induce the MUC5AC promoter. After twenty hours of induction the cells are harvested and assayed for phenotypic and molecular parameters. Reduced GFP expression in GeneBloc treated cells (measured by flow cytometry) is taken as evidence for validation of hCLCA1. Knockdown of hCLCA1 RNA in GeneBloc treated cells can correlate with reduced endogenous MUC5AC RNA and reduced GFP RNA (from the MUC5AC/GFP construct) to complete validation of hCLCA1.

### Example 9

### Identification of Potential Target Sites in Human CLCA1 RNA

[0166] The sequence of human CLCA1 is screened for accessible sites using a computer-folding algorithm. Regions of the RNA are identified that do not form secondary folding structures. These regions contain potential ribozyme and/or antisense binding/cleavage sites. The sequences of these binding/cleavage sites are shown in Tables III-IX.

### Example 10

### Selection of Enzymatic Nucleic Acid Cleavage Sites in Human CLCA1 RNA

[0167] Ribozyme target sites are chosen by analyzing sequences of Human CLCA1 (GenBank accession numbers: NM_{—}001285 and AF039400) and prioritizing the sites on the basis of folding. Ribozymes are designed that could bind each target and are individually analyzed by computer folding (Christoffersen et al., 1994 J. Mol. Struc. Theochem, 311, 273; Jaeger et al., 1989, Proc. Natl. Acad. Sci. USA, 86, 7706) to assess whether the ribozyme sequences fold into the appropriate secondary structure. Those ribozymes with unfavorable intramolecular interactions between the binding arms and the catalytic core are eliminated from consideration. As noted below, varying binding arm lengths can be chosen to optimize activity. Generally, at least 5 bases on each arm are able to bind to, or otherwise interact with, the target RNA.

### Example 11

### Chemical Synthesis and Purification of Ribozymes and Antisense for Efficient Cleavage and/or blocking of CLCA1 RNA

[0168] Ribozymes and antisense constructs are designed to anneal to various sites in the RNA message. The binding arms of the ribozymes are complementary to the target site sequences described above, while the antisense constructs are fully complimentary to the target site sequences described above. The ribozymes and antisense constructs were chemically synthesized. The method of synthesis used followed the procedure for normal RNA synthesis as described above and in Usman et al., (1987 J. Am. Chem. Soc., 109, 7845), Scaringe et al., (1990 Nucleic Acids Res., 18, 5433) and Wincott et al., supra, and made use of common nucleic acid protecting and coupling groups, such as dimethoxytrityl at the 5′-end, and phosphoramidites at the 3′-end. The average stepwise coupling yields were typically >98%.

[0169] Ribozymes and antisense constructs are also synthesized from DNA templates using bacteriophage T7 RNA polymerase (Milligan and Uhlenbeck, 1989, Methods Enzymol. 180, 51). Ribozymes and antisense constructs are purified by gel electrophoresis using general methods or are purified by high pressure liquid chromatography (HPLC; see Wincott et al., supra; the totality of which is hereby incorporated herein by reference) and are resuspended in water. The sequences of the chemically synthesized ribozymes and antisense constructs used in this study are shown below in Table III-IX.

[0170] Indications

[0171] Particular conditions and disease states that can be associated with CLCA1 expression modulation include but are not limited to Chronic Obstructive Pulmonary Disease (COPD), chronic bronchitis, asthma, cystic fibrosis, obstructive bowel syndrome, and any other diseases or conditions that are related to or will respond to the levels of CLCA1 in a cell or tissue, alone or in combination with other therapies.

[0172] The present body of knowledge in CLCA1 research indicates the need for methods to assay CLCA1 activity and for compounds that can regulate CLCA1 expression for research, diagnostic, and therapeutic use.

[0173] The nucleic acid molecules of the present invention may also be administered to a patient in combination with other therapeutic compounds to increase the overall therapeutic effect. The use of multiple compounds to treat an indication may increase the beneficial effects while reducing the presence of side effects. Oxygen therapy, bronchodilators, corticosteroids, antibacterials, vaccinations, acetylcysteine, mucokinetic agents, and DNase (Pulmozyme), are non-limiting examples of methods and/or treatments that can be used in combination with nucleic acid molecules of the invention. Those skilled in the art will recognize that other drug compounds and therapies can be similarly and readily combined with the nucleic acid molecules of the instant invention (e.g. ribozymes and antisense molecules) and are, therefore, within the scope of the instant invention.

[0174] Cell Culture

[0175] The cell culture system described in Example 8 can be used to evaluate nucleic acid molecules of the invention for efficacy in CLCA1 and mucin modulation.

[0176] Animal Models

[0177] Numerous reports can be found which describe animal models relevant to disease states such as COPD and cystic fibrosis. These models can be used to determine efficacy of the nucleic acid molecules of the instant invention targeting such disease states or conditions. Animal models for chronic pulmonary disease (COPD) are described by Shapiro, 2000, Am. J. Respir. Cell Mol. BioL, 22(1), 4-7; Hogg, 1998, Ika Daigaku Zasshi, 56(3), 429-432; and Garssen et al., 1997, Inhalation Toxicol., 9(6), 581-599. Animal models for cystic fibrosis are described by Kent et al., 1997, J. Clin. Invest., 100(12), 3060-3069; Hill et al., 1997, 62(1), 113-122; Grubb and Gabriel, 1997, Am. J. Physiol., 272, G258-G266; Rozmahel, 1996, From: Diss. Abstr. Int. B 1997, 57(8), 4863; Van Doominck et al., 1995, EMBOJ., 14(18), 4403-11; and Zeiher et al., 1995, J. Clin. Invest., 96(4), 2051-64.

[0178] Diagnostic Uses

[0179] The nucleic acid molecules of this invention (e.g., ribozymes) may be used as diagnostic tools to examine genetic drift and mutations within diseased cells or to detect the presence of CLCA1 RNA in a cell. The close relationship between ribozyme activity and the structure of the target RNA allows the detection of mutations in any region of the molecule which alters the base-pairing and three-dimensional structure of the target RNA. By using multiple ribozymes described in this invention, one may map nucleotide changes which are important to RNA structure and function in vitro, as well as in cells and tissues. Cleavage of target RNAs with ribozymes may be used to inhibit gene expression and define the role (essentially) of specified gene products in the progression of disease. In this manner, other genetic targets may be defined as important mediators of the disease. These experiments will lead to better treatment of the disease progression by affording the possibility of combinational therapies (e.g., multiple ribozymes targeted to different genes, ribozymes coupled with known small molecule inhibitors, or intermittent treatment with combinations of ribozymes and/or other chemical or biological molecules). Other in vitro uses of ribozymes of this invention are well known in the art, and include detection of the presence of mRNAs associated with CLCA1 -related condition. Such RNA is detected by determining the presence of a cleavage product after treatment with a ribozyme using standard methodology.

[0180] In a specific example, ribozymes which can cleave only wild-type or mutant forms of the target RNA are used for the assay. The first ribozyme is used to identify wild-type RNA present in the sample and the second ribozyme will be used to identify mutant RNA in the sample. As reaction controls, synthetic substrates of both wild-type and mutant RNA will be cleaved by both ribozymes to demonstrate the relative ribozyme efficiencies in the reactions and the absence of cleavage of the “non-targeted” RNA species. The cleavage products from the synthetic substrates will also serve to generate size markers for the analysis of wild-type and mutant RNAs in the sample population. Thus, each analysis can require two ribozymes, two substrates and one unknown sample, which will be combined into six reactions. The presence of cleavage products will be determined using an RNAse protection assay so that full-length and cleavage fragments of each RNA can be analyzed in one lane of a polyacrylamide gel. It is not absolutely required to quantify the results to gain insight into the expression of mutant RNAs and putative risk of the desired phenotypic changes in target cells. The expression of mRNA whose protein product is implicated in the development of the phenotype (i.e., CLCA1) is adequate to establish risk. If probes of comparable specific activity are used for both transcripts, then a qualitative comparison of RNA levels will be adequate and will decrease the cost of the initial diagnosis. Higher mutant form to wild-type ratios will be correlated with higher risk whether RNA levels are compared qualitatively or quantitatively.

[0181] Additional Uses

[0182] Potential usefulness of sequence-specific enzymatic nucleic acid molecules of the instant invention might have many of the same applications for the study of RNA that DNA restriction endonucleases have for the study of DNA (Nathans et al., 1975 Ann. Rev. Biochem. 44:273). For example, the pattern of restriction fragments could be used to establish sequence relationships between two related RNAs, and large RNAs could be specifically cleaved to fragments of a size more useful for study. The ability to engineer sequence specificity of the enzymatic nucleic acid molecule is ideal for cleavage of RNAs of unknown sequence. Applicant describes the use of nucleic acid molecules to down-regulate gene expression of target genes in bacterial, microbial, fungal, viral, and eukaryotic systems including plant, or mammalian cells.

[0183] All patents and publications mentioned in the specification are indicative of the . levels of skill of those skilled in the art to which the invention pertains. All references cited in this disclosure are incorporated by reference to the same extent as if each reference had been incorporated by reference in its entirety individually.

[0184] One skilled in the art would readily appreciate that the present invention is well adapted to carry out the objects and obtain the ends and advantages mentioned, as well as those inherent therein. The methods and compositions described herein as presently representative of preferred embodiments are exemplary and are not intended as limitations on the scope of the invention. Changes therein and other uses will occur to those skilled in the art, which are encompassed within the spirit of the invention, are defined by the scope of the claims.

[0185] It will be readily apparent to one skilled in the art that varying substitutions and modifications may be made to the invention disclosed herein without departing from the scope and spirit of the invention. Thus, such additional embodiments are within the scope of the present invention and the following claims.

[0186] The invention illustratively described herein suitably may be practiced in the absence of any element or elements, limitation or limitations which is not specifically disclosed herein. Thus, for example, in each instance herein any of the terms “comprising”, “consisting essentially of” and “consisting of” may be replaced with either of the other two terms. The terms and expressions which have been employed are used as terms of description and not of limitation, and there is no intention that in the use of such terms and expressions of excluding any equivalents of the features shown and described or portions thereof, but it is recognized that various modifications are possible within the scope of the invention claimed. Thus, it should be understood that although the present invention has been specifically disclosed by preferred embodiments, optional features, modification and variation of the concepts herein disclosed may be resorted to by those skilled in the art, and that such modifications and variations are considered to be within the scope of this invention as defined by the description and the appended claims.

[0187] In addition, where features or aspects of the invention are described in terms of Markush groups or other grouping of alternatives, those skilled in the art will recognize that the invention is also thereby described in terms of any individual member or subgroup of members of the Markush group or other group.

[0188] Other embodiments are within the following claims.

TABLE I
Characteristics of naturally occurring ribozymes

Group I Introns
Size: ˜150 to >1000 nucleotides.
Requires a U in the target sequence immediately 5′ of the cleavage site.
Binds 4-6 nucleotides at the 5′-side of the cleavage site.
Reaction mechanism: attack by the 3′-OH of guanosine to generate
cleavage products with 3′-OH and 5′-guanosine.
Additional protein cofactors required in some cases to help folding and
maintainance of the active structure.
Over 300 known members of this class. Found as an intervening sequence
in Tetrahymena thermophila rRNA, fungal mitochondria, chloroplasts,
phage T4, blue-green algae, and others.
Major structural features largely established through phylogenetic
comparisons, mutagenesis, and biochemical studies [ⁱ,ⁱⁱ].
Complete kinetic framework established for one ribozyme [ⁱⁱⁱ,^{iv},^{v},^{vi}].
Studies of ribozyme folding and substrate docking underway [^{vii},^{viii},^{ix}].
Chemical modification investigation of important residues well established
[^{x},^{xi}]
The small (4-6 nt) binding site may make this ribozyme too non-specific
for targeted RNA cleavage, however, the Tetrahymena group I intron has
been used to repair a “defective” □-galactosidase message by the ligation
of new □-galactosidase sequences onto the defective message [^{xii}].
RNAse P RNA (M1 RNA)
Size: ˜290 to 400 nucleotides.
RNA portion of a ubiquitous ribonucleoprotein enzyme.
Cleaves tRNA precursors to form mature tRNA [^{xiii}].
Reaction mechanism: possible attack by M²⁺-OH to generate cleavage
products with 3′-OH and 5′-phosphate.
RNAse P is found throughout the prokaryotes and eukaryotes. The RNA
subunit has been sequenced from bacteria, yeast, rodents, and primates.
Recruitment of endogenous RNAse P for therapeutic applications is
possible through hybridization of an External Guide Sequence (EGS) to
the target RNA [^{xiv},^{xv}]
Important phosphate and 2′-OH contacts recently identified [^{xvi},^{xvii}]
Group II Introns
Size: >1000 nucleotides.
Trans cleavage of target RNAs recently demonstrated [^{xviii},^{xix}].
Sequence requirements not fully determined.
Reaction mechanism: 2′-OH of an internal adenosine generates cleavage
products with 3′-OH and a “lariat” RNA containing a 3′-5′ and a 2′-5′
branch point.
Only natural ribozyme with demonstrated participation in DNA cleavage
[^{xx},^{xxi}] in addition to RNA cleavage and ligation.
Major structural features largely established through phylogenetic
comparisons [^{xxii}].
Important 2′-OH contacts beginning to be identified [^{xxiii}]
Kinetic framework under development [^{xxiv}]
Neurospora VS RNA
Size: ˜144 nucleotides.
Trans cleavage of hairpin target RNAs recently demonstrated [^{xxv}].
Sequence requirements not fully determined.
Reaction mechanism: attack by 2′-OH 5′ to the scissile bond to generate
cleavage products with 2′,3′-cyclic phosphate and 5′-OH ends.
Binding sites and structural requirements not fully determined.
Only 1 known member of this class. Found in Neurospora VS RNA.
Hammerhead Ribozyme
(see text for references)
Size: ˜13 to 40 nucleotides.
Requires the target sequence UH immediately 5′ of the cleavage site.
Binds a variable number nucleotides on both sides of the cleavage site.
Reaction mechanism: attack by 2′-OH 5′ to the scissile bond to generate
cleavage products with 2′,3′-cyclic phosphate and 5′-OH ends.
14 known members of this class. Found in a number of plant pathogens
(virusoids) that use RNA as the infectious agent.
Essential structural features largely defined, including 2 crystal structures
[^{xxvi},^{xxvii}]
Minimal ligation activity demonstrated (for engineering through in vitro
selection) [^{xxviii}]
Complete kinetic framework established for two or more ribozymes [^{xxix}].
Chemical modification investigation of important residues well established
[^{xxx}].
Hairpin Ribozyme
Size: ˜50 nucleotides.
Requires the target sequence GUC immediately 3′ of the cleavage site.
Binds 4-6 nucleotides at the 5′-side of the cleavage site and a variable
number to the 3′-side of the cleavage site.
Reaction mechanism: attack by 2′-OH 5′ to the scissile bond to generate
cleavage products with 2′,3′-cyclic phosphate and 5′-OH ends.
3 known members of this class. Found in three plant pathogen (satellite
RNAs of the tobacco ringspot virus, arabis mosaic virus and chicory
yellow mottle virus) which uses RNA as the infectious agent.
Essential structural features largely defined [^{xxxi},^{xxxii},^{xxxiii},^{xxxiv}]
Ligation activity (in addition to cleavage activity) makes ribozyme
amenable to engineering through in vitro selection [^{xxxv}]
Complete kinetic framework established for one ribozyme [^{xxxvi}].
Chemical modification investigation of important residues begun
[^{xxxvii},^{xxxviii}].
Hepatitis Delta Virus (HDV) Ribozyme
Size: ˜60 nucleotides.
Trans cleavage of target RNAs demonstrated [^{xxxix}].
Binding sites and structural requirements not fully determined, although no
sequences 5′ of cleavage site are required. Folded ribozyme contains a
pseudoknot structure [^{xl}].
Reaction mechanism: attack by 2′-OH 5′ to the scissile bond to generate
cleavage products with 2′,3′-cyclic phosphate and 5′-OH ends.
Only 2 known members of this class. Found in human HDV.
Circular form of HDV is active and shows increased nuclease stability
[^{xli}]
ⁱMichel, Francois; Westhof, Eric. Slippery substrates. Nat. Struct. Biol. (1994), 1(1), 5-7.
ⁱⁱLisacek, Frederique; Diaz, Yolande; Michel, Francois. Automatic identification of group I intron cores in genomic DNA sequences. J. Mol. Biol. (1994), 235(4), 1206-17.
ⁱⁱⁱHerschlag, Daniel; Cech, Thomas R., Catalysis of RNA cleavage by the Tetrahymena thermophila ribozyme. 1. Kinetic description of the reaction of an RNA substrate complementary to the active site. Biochemistry (1990), 29(44), 10159-71.
^{iv}Herschlag, Daniel; Cech, Thomas R., Catalysis of RNA cleavage by the Tetrahymena thermophila ribozyme. 2. Kinetic description of the reaction of an RNA substrate that forms a mismatch at the active site. Biochemistry (1990), 29(44), 10172-80.
^{v}Knitt, Deborah S.; Herschlag, Daniel. pH Dependencies of the Tetrahymena Ribozyme Reveal an Unconventional Origin of an Apparent pKa. Biochemistry (1996), 35(5), 1560-70.
^{vi}Bevilacqua, Philip C.; Sugimoto, Naoki; Turner, Douglas H., A mechanistic framework for the second step of splicing catalyzed by the Tetrahymena ribozyme. Biochemistry (1996), 35(2), 648-58.
^{vii}Li, Yi; Bevilacqua, Philip C.; Mathews, David; Turner, Douglas H., Thermodynamic and activation parameters for binding of a pyrene-labeled substrate by the Tetrahymena ribozyme: docking is not diffusion-controlled and is driven by a favorable entropy change. Biochemistry (1995), 34(44), 14394-9.
^{viii}Banerjee, Aloke Raj; Turner, Douglas H., The time dependence of chemical modification reveals slow steps in the folding of a group I ribozyme. Biochemistry (1995), 34(19), 6504-12.
^{ix}Zarrinkar, Patrick P.; Williamson, James R., The P9.1-P9.2 peripheral extension helps guide folding of the Tetrahymena ribozyme. Nucleic Acids Res. (1996), 24(5), 854-8.
^{x}Strobel, Scott A.; Cech, Thomas R., Minor groove recognition of the conserved G.cntdot.U Pair at the Tetrahymena ribozyme reaction site. Science (Washington, D. C.) (1995), 267(5198), 675-9.
^{xi}Strobel, Scott A.; Cech, Thomas R., Exocyclic Amine of the Conserved G.cntdot.U Pair at the Cleavage Site of the Tetrahymena Ribozyme Contributes to 5′-Splice Site Selection and Transition State Stabilization. Biochemistry (1996), 35(4), 1201-11.
^{xii}Sullenger, Bruce A.; Cech, Thomas R., Ribozyme-mediated repair of defective mRNA by targeted trans-splicing. Nature (London) (1994), 371(6498), 619-22.
^{xiii}Robertson, H.D.; Altman, S.; Smith, J. D. J. Biol. Chem., 247, 5243-5251 (1972).
^{xiv}Forster, Anthony C.; Altman, Sidney. External guide sequences for an RNA enzyme. Science (Washington, D. C., 1883-) (1990), 249(4970), 783-6.
^{xv}Yuan, Y.; Hwang, E. S.; Altman, S. Targeted cleavage of mRNA by human RNase P. Proc. Natl. Acad. Sci. USA (1992) 89, 8006-10.
^{xvi}Harris, Michael E.; Pace, Norman R., Identification of phosphates involved in catalysis by the ribozyme RNase P RNA. RNA (1995), 1(2), 210-18.
^{xvii}Pan, Tao; Lana, Andrew; Zhong, Kun. Probing of tertiary interactions in RNA: 2-hydroxyl-base contacts between the RNase P RNA and pre-tRNA. Proc. Natl. Acad. Sci. U.S.A. (1995), 92(26), 12510-14.
^{xviii}Pyle, Anna Marie; Green, Justin B.. Building a Kinetic Framework for Group II Intron Ribozyme Activity: Quantitation of Interdomain Binding and Reaction Rate. Biochemistry (1994), 33(9), 2716-25.
^{xix}Michels, William J. Jr.; Pyle, Anna Marie. Conversion of a Group II Intron into a New Multiple-Turnover Ribozyme that Selectively Cleaves Oligonucleotides: Elucidation of Reaction Mechanism and Structure/Function Relationships. Biochemistry (1995), 34(9), 2965-77.
^{xx}Zimmerly, Steven; Guo, Huatao; Eskes, Robert; Yang, Jian; Perlman, Philip S.; Lambowitz, Alan M., A group II intron RNA is a catalytic component of a DNA endonuclease involved in intron mobility. Cell (Cambridge, Mass.) (1995), 83(4), 529-38.
^{xxi}Griffin, Edmund A., Jr.; Qin, Zhifeng; Michels, Williams J., Jr.; Pyle, Anna Marie. Group II intron ribozymes that cleave DNA and RNA linkages with similar efficiency, and lack contacts with substrate 2-hydroxyl groups. Chem. Biol. (1995), 2(11), 761-70.
^{xxii}Michel, Francois; Ferat, Jean Luc. Structure and activities of group II introns. Annu. Rev. Biochem. (1995), 64, 435-61.
^{xxiii}Abramovitz, Dana L.; Friedman, Richard A.; Pyle, Anna Marie. Catalytic role of 2′-hydroxyl groups within a group II intron active site. Science (Washington, D.C.) (1996), 271(5254), 1410-13.
^{xxiv}Daniels, Danette L.; Michels, William J., Jr.; Pyle, Anna Marie. Two competing pathways for self-splicing by group II introns: a quantitative analysis of in vitro reaction rates and products. J. Mol. Biol. (1996), 256(1), 31-49.
^{xxv}Guo, Hans C. T.; Collins, Richard A.. Efficient trans-cleavage of a stem-loop RNA substrate by a ribozyme derived from Neurospora VS RNA. EMBO J. (1995), 14(2), 368-76.
^{xxvi}Scott, W. G., Finch, J. T., Aaron, K. The crystal structure of an all RNA hammerhead ribozyme: A proposed mechanism for RNA catalytic cleavage. Cell, (1995), 81, 991-1002.
^{xxvii}McKay, Structure and function of the hammerhead ribozyme: an unfinished story. RNA, (1996), 2, 395-403.
^{xxviii}Long, D., Uhlenbeck, O., Hertel, K. Ligation with hammerhead ribozymes. U.S. Pat. No. 5,633,133.
^{xxix}Hertel, K. J., Herschlag, D., Uhlenbeck, O. A kinetic and thermodynamic framework for the hammerhead ribozyme reaction. Biochemistry, (1994) 33, 3374-3385. Beigelman, L., et aL, Chemical modifications of hammerhead ribozymes. J. Biol. Chem., (1995) 270, 25702-25708.
^{xxx}Beigelman, L., et al, Chemical modifications of hammerhead ribozymes. J. Biol. Chem., (1995) 270, 25702-25708.
^{xxxi}Hampel, Arnold; Tritz, Richard; Hicks, Margaret; Cruz, Philip. ‘Hairpin’ catalytic RNA model: evidence for helixes and sequence requirement for substrate RNA. Nucleic Acids Res. (1990), 18(2), 299-304.
^{xxxii}Chownira, Bharat M.; Berzal-Herranz, Alfredo; Burke, John M., Novel guanosine requirement for catalysis by the hairpin ribozyme. Nature (London) (1991), 354(6351), 320-2.
^{xxxiii}Berzal-Herranz, Alfredo; Joseph, Simpson; Chowrira, Bharat M.; Butcher, Samuel E.; Burke, John M., Essential nucleotide sequences and secondary structure elements of the hairpin ribozyme. EMBO J. (1993), 12(6), 2567-73.
^{xxxiv}Joseph, Simpson; Berzal-Herranz, Alfredo; Chownira, Bharat M.; Butcher, Samuel E., Substrate selection rules for the hairpin ribozyme determined by in vitro selection, mutation, and analysis of mismatched substrates. Genes Dev. (1993), 7(1), 130-8.
^{xxxv}Berzal-Herranz, Alfredo; Joseph, Simpson; Burke, John M., In vitro selection of active hairpin ribozymes by sequential RNA-catalyzed cleavage and ligation reactions. Genes Dev. (1992), 6(1), 129-34.
^{xxxvi}Hegg, Lisa A.; Fedor, Martha J., Kinetics and Thermodynamics of Intermolecular Catalysis by Hairpin Ribozymes. Biochemistry (1995), 34(48), 15813-28.
^{xxxvii}Grasby, Jane A.; Mersmann, Karin; Singh, Mohinder; Gait, Michael J., Purine Functional Groups in Essential Residues of the Hairpin Ribozyme Required for Catalytic Cleavage of RNA. Biochemistry (1995), 34(12), 4068-76.
^{xxxviii}Schmidt, Sabine; Beigelman, Leonid; Karpeisky, Alexander; Usman, Nassim; Sorensen, Ukik S.; Gait, Michael J., Base and sugar requirements for RNA cleavage of essential nucleoside residues in internal loop B of the hairpin ribozyme: implications for secondary structure. Nucleic Acids Res. (1996), 24(4), 573-81.
^{xxxix}Perrotta, Anne T.; Been, Michael D., Cleavage of oligoribonucleotides by a ribozyme derived from the hepatitis delta. virus RNA sequence. Biochemistry (1992), 31(1), 16-21.
^{xl}Perrotta, Anne T.; Been, Michael D., A pseudoknot-like structure required for efficient self-cleavage of hepatitis delta virus RNA. Nature (London) (1991), 350(6317), 434-6.
^{xli}Puttaraju, M.; Perrotta, Anne T.; Been, Michael D., A circular trans-acting hepatitis delta virus ribozyme. Nucleic Acids Res. (1993), 21(18), 4253-8.

[0189] TABLE II

| | | | | | |
|---|---|---|---|---|---|
| | | | Wait | Wait | Wait |
| | Equiva- | | Time* | Time* | Time* |
| Reagent | lents | Amount | DNA | 2′-O-methyl | RNA |

A. 2.5 μmol Synthesis Cycle ABI 394 Instrument

| | | | | | |
|---|---|---|---|---|---|
| Phosphoramidites | 6.5 | 163 μL | 45 sec | 2.5 min | 7.5 min |
| S-Ethyl Tetrazole | 23.8 | 238 μL | 45 sec | 2.5 min | 7.5 min |
| Acetic Anhydride | 100 | 233 μL | 5 sec | 5 sec | 5 sec |
| N-Methyl | 186 | 233 μL | 5 sec | 5 sec | 5 sec |
| Imidazole | | | | | |
| TCA | 176 | 2.3 mL | 21 sec | 21 sec | 21 sec |
| Iodine | 11.2 | 1.7 mL | 45 sec | 45 sec | 45 sec |
| Beaucage | 12.9 | 645 μL | 100 sec | 300 sec | 300 sec |
| Acetonitrile | NA | 6.67 mL | NA | NA | NA |

B. 0.2 μmol Synthesis Cycle ABI 394 Instrument

| | | | | | |
|---|---|---|---|---|---|
| Phosphoramidites | 15 | 31 μL | 45 sec | 233 sec | 465 sec |
| S-Ethyl Tetrazole | 38.7 | 31 μL | 45 sec | 233 min | 465 sec |
| Acetic Anhydride | 655 | 124 μL | 5 sec | 5 sec | 5 sec |
| N-Methyl | 1245 | 124 μL | 5 sec | 5 sec | 5 sec |
| Imidazole | | | | | |
| TCA | 700 | 732 μL | 10 sec | 10 sec | 10 sec |
| Iodine | 20.6 | 244 μL | 15 sec | 15 sec | 15 sec |
| Beaucage | 7.7 | 232 μL | 100 sec | 300 sec | 300 sec |
| Acetonitrile | NA | 2.64 mL | NA | NA | NA |

C. 0.2 μmol Synthesis Cycle 96 well Instrument

| | Equiva- | | | | |
|---|---|---|---|---|---|
| | lents | Amount | | Wait | |
| | DNA/2′- | DNA/2′- | Wait | Time* | Wait |
| | O-methyl/ | O-methyl/ | Time* | 2′-O- | Time* |
| Reagent | Ribo | Ribo | DNA | methyl | Ribo |
| Phosphoramidites | 22/33/66 | 40/60/ | 60 sec | 180 sec | 360 sec |
| | | 120 μL | | | |
| S-Ethyl Tetrazole | 70/105/ | 40/60/ | 60 sec | 180 min | 360 sec |
| | 210 | 120 μL | | | |
| Acetic Anhydride | 265/265/ | 50/50/ | 10 sec | 10 sec | 10 sec |
| | 265 | 50 μL | | | |
| N-Methyl | 502/502/ | 50/50/ | 10 sec | 10 sec | 10 sec |
| Imidazole | 502 | 50 μL | | | |
| TCA | 238/475/ | 250/500/ | 15 sec | 15 sec | 15 sec |
| | 475 | 500 μL | | | |
| Iodine | 6.8/6.8/ | 80/80/ | 30 sec | 30 sec | 30 sec |
| | 6.8 | 80 μL | | | |
| Beaucage | 34/51/51 | 80/120/120 | 100 sec | 200 sec | 200 sec |
| Acetonitrile | NA | 1150/1150/ | NA | NA | NA |
| | | 1150 μL | | | |

*Wait time does not include contact time during delivery.

[0190] TABLE III
Human CLCA1 Hammerhead Ribozyme and Target Sequence 249.021

| | | | | |
|---|---|---|---|---|
| | | | | Rz |
| | | Seq ID | | Seq ID |
| Pos | Substrate | No. | Ribozyme | No. |

| | | | | | |
|---|---|---|---|---|---|
| 11 | CUAAUGCU U UUGGUACA | 1 | UGUACCAA CUGAUGAG GCCGUUAGGC CGAA AGCAUUAG | 2190 | |
| 12 | UAAUGCUU U UGGUACAA | 2 | UUGUACCA CUGAUGAG GCCGUUAGGC CGAA AAGCAUUA | 2191 | |
| 13 | AAUGCUUU U GGUACAAA | 3 | UUUGUACC CUGAUGAG GCCGUUAGGC CGAA AAAGCAUU | 2192 | |
| 17 | CUUUUGGU A CAAAUGGA | 4 | UCCAUUUG CUGAUGAG GCCGUUAGGC CGAA ACCAAAAG | 2193 | |
| 34 | UGUGGAAU A UAAUUGAA | 5 | UUCAAUUA CUGAUGAG GCCGUUAGGC CGAA AUUCCACA | 2194 | |
| 36 | UGGAAUAU A AUUGAAUA | 6 | UAUUCAAU CUGAUGAG GCCGUUAGGC CGAA AUAUUCCA | 2195 | |
| 39 | AAUAUAAU U GAAUAUUU | 7 | AAAUAUUC CUGAUGAG GCCGUUAGGC CGAA AUUAUAUU | 2196 | |
| 44 | AAUUGAAU A UUUUCUUG | 8 | CAAGAAAA CUGAUGAG GCCGUUAGGC CGAA AUUCAAUU | 2197 | |
| 46 | UUGAAUAU U UUCUUGUU | 9 | AACAAGAA CUGAUGAG GCCGUUAGGC CGAA AUAUUCAA | 2198 | |
| 47 | UGAAUAUU U UCUUGUUU | 10 | AAACAAGA CUGAUGAG GCCGUUAGGC CGAA AAUAUUCA | 2199 | |
| 48 | GAAUAUUU U CUUGUUUA | 11 | UAAACAAG CUGAUGAG GCCGUUAGGC CGAA AAAUAUUC | 2200 | |
| 49 | AAUAUUUU C UUGUUUAA | 12 | UUAAACAA CUGAUGAG GCCGUUAGGC CGAA AAAAUAUU | 2201 | |
| 51 | UAUUUUCU U GUUUAAGG | 13 | CCUUAAAC CUGAUGAG GCCGUUAGGC CGAA AGAAAAUA | 2202 | |
| 54 | UUUCUUGU U UAAGGGGA | 14 | UCCCCUUA CUGAUGAG GCCGUUAGGC CGAA ACAAGAAA | 2203 | |
| 55 | UUCUUGUU U AAGGGGAG | 15 | CUCCCCUU CUGAUGAG GCCGUUAGGC CGAA AACAAGAA | 2204 | |
| 56 | UCUUGUUU A AGGGGAGC | 16 | GCUCCCCU CUGAUGAG GCCGUUAGGC CGAA AAACAAGA | 2205 | |
| 77 | AGAGGUGU U GAGGUUAU | 17 | AUAACCUC CUGAUGAG GCCGUUAGGC CGAA ACACCUCU | 2206 | |
| 83 | GUUGAGGU U AUGUCAAG | 18 | CUUGACAU CUGAUGAG GCCGUUAGGC CGAA ACCUCAAC | 2207 | |
| 84 | UUGAGGUU A UGUCAAGC | 19 | GCUUGACA CUGAUGAG GCCGUUAGGC CGAA AACCUCAA | 2208 | |
| 88 | GGUUAUGU C AAGCAUCU | 20 | AGAUGCUU CUGAUGAG GCCGUUAGGC CGAA ACAUAACC | 2209 | |
| 95 | UCAAGCAU C UGGCACAG | 21 | CUGUGCCA CUGAUGAG GCCGUUAGGC CGAA AUGCUUGA | 2210 | |
| 122 | AUGGAAAU A UUUACAAG | 22 | CUUGUAAA CUGAUGAG GCCGUUAGGC CGAA AUUUCCAU | 2211 | |
| 124 | GGAAAUAU U UACAAGUA | 23 | UACUUGUA CUGAUGAG GCCGUUAGGC CGAA AUAUUUCC | 2212 | |
| 125 | GAAAUAUU U ACAAGUAC | 24 | GUACUUGU CUGAUGAG GCCGUUAGGC CGAA AAUAUUUC | 2213 | |
| 126 | AAAUAUUU A CAAGUACG | 25 | CGUACUUG CUGAUGAG GCCGUUAGGC CGAA AAAUAUUU | 2214 | |
| 132 | UUACAAGU A CGCAAUUU | 26 | AAAUUGCG CUGAUGAG GCCGUUAGGC CGAA ACUUGUAA | 2215 | |
| 139 | UACGCAAU U UGAGACUA | 27 | UAGUCUCA CUGAUGAG GCCGUUAGGC CGAA AUUGCGUA | 2216 | |
| 140 | ACGCAAUU U GAGACUAA | 28 | UUAGUCUC CUGAUGAG GCCGUUAGGC CGAA AAUUGCGU | 2217 | |
| 147 | UUGAGACU A AGAUAUUG | 29 | CAAUAUCU CUGAUGAG GCCGUUAGGC CGAA AGUCUCAA | 2218 | |
| 152 | ACUAAGAU A UUGUUAUC | 30 | GAUAACAA CUGAUGAG GCCGUUAGGC CGAA AUCUUAGU | 2219 | |
| 154 | UAAGAUAU U GUUAUCAU | 31 | AUGAUAAC CUGAUGAG GCCGUUAGGC CGAA AUAUCUUA | 2220 | |
| 157 | GAUAUUGU U AUCAUUCU | 32 | AGAAUGAU CUGAUGAG GCCGUUAGGC CGAA ACAAUAUC | 2221 | |
| 158 | AUAUUGUU A UCAUUCUC | 33 | GAGAAUGA CUGAUGAG GCCGUUAGGC CGAA AACAAUAU | 2222 | |
| 160 | AUUGUUAU C AUUCUCCU | 34 | AGGAGAAU CUGAUGAG GCCGUUAGGC CGAA AUAACAAU | 2223 | |
| 163 | GUUAUCAU U CUCCUAUU | 35 | AAUAGGAG CUGAUGAG GCCGUUAGGC CGAA AUGAUAAC | 2224 | |
| 164 | UUAUCAUU C UCCUAUUG | 36 | CAAUAGGA CUGAUGAG GCCGUUAGGC CGAA AAUGAUAA | 2225 | |
| 166 | AUCAUUCU C CUAUUGAA | 37 | UUCAAUAG CUGAUGAG GCCGUUAGGC CGAA AGAAUGAU | 2226 | |
| 169 | AUUCUCCU A UUGAAGAC | 38 | GUCUUCAA CUGAUGAG GCCGUUAGGC CGAA AGGAGAAU | 2227 | |
| 171 | UCUCCUAU U GAAGACAA | 39 | UUGUCUUC CUGAUGAG GCCGUUAGGC CGAA AUAGGAGA | 2228 | |
| 187 | AGAGCAAU A GUAAAACA | 40 | UGUUUUAC CUGAUGAG GCCGUUAGGC CGAA AUUGCUCU | 2229 | |
| 190 | GCAAUAGU A AAACACAU | 41 | AUGUGUUU CUGAUGAG GCCGUUAGGC CGAA ACUAUUGC | 2230 | |
| 199 | AAACACAU C AGGUCAGG | 42 | CCUGACCU CUGAUGAG GCCGUUAGGC CGAA AUGUGUUU | 2231 | |
| 204 | CAUCAGGU C AGGGGGUU | 43 | AACCCCCU CUGAUGAG GCCGUUAGGC CGAA ACCUGAUG | 2232 | |
| 212 | CAGGGGGU U AAAGACCU | 44 | AGGUCUUU CUGAUGAG GCCGUUAGGC CGAA ACCCCCUG | 2233 | |
| 213 | AGGGGGUU A AAGACCUG | 45 | CAGGUCUU CUGAUGAG GCCGUUAGGC CGAA AACCCCCU | 2234 | |
| 226 | CCUGUGAU A AACCACUU | 46 | AAGUGGUU CUGAUGAG GCCGUUAGGC CGAA AUCACAGG | 2235 | |
| 234 | AAACCACU U CCGAUAAG | 47 | CUUAUCGG CUGAUGAG GCCGUUAGGC CGAA AGUGGUUU | 2236 | |
| 235 | AACCACUU C CGAUAAGU | 48 | ACUUAUCG CUGAUGAG GCCGUUAGGC CGAA AAGUGGUU | 2237 | |
| 240 | CUUCCGAU A AGUUGGAA | 49 | UUCCAACU CUGAUGAG GCCGUUAGGC CGAA AUCGGAAG | 2238 | |
| 244 | CGAUAAGU U GGAAACGU | 50 | ACGUUUCC CUGAUGAG GCCGUUAGGC CGAA ACUUAUCG | 2239 | |
| 257 | ACGUGUGU C UAUAUUUU | 51 | AAAAUAUA CUGAUGAG GCCGUUAGGC CGAA ACACACGU | 2240 | |
| 259 | GUGUGUCU A UAUUUUCA | 52 | UGAAAAUA CUGAUGAG GCCGUUAGGC CGAA AGACACAC | 2241 | |
| 261 | GUGUCUAU A UUUUCAUA | 53 | UAUGAAAA CUGAUGAG GCCGUUAGGC CGAA AUAGACAC | 2242 | |
| 263 | GUCUAUAU U UUCAUAUC | 54 | GAUAUGAA CUGAUGAG GCCGUUAGGC CGAA AUAUAGAC | 2243 | |
| 264 | UCUAUAUU U UCAUAUCU | 55 | AGAUAUGA CUGAUGAG GCCGUUAGGC CGAA AAUAUAGA | 2244 | |
| 265 | CUAUAUUU U CAUAUCUG | 56 | CAGAUAUG CUGAUGAG GCCGUUAGGC CGAA AAAUAUAG | 2245 | |
| 266 | UAUAUUUU C AUAUCUGU | 57 | ACAGAUAU CUGAUGAG GCCGUUAGGC CGAA AAAAUAUA | 2246 | |
| 269 | AUUUUCAU A UCUGUAUA | 58 | UAUACAGA CUGAUGAG GCCGUUAGGC CGAA AUGAAAAU | 2247 | |
| 271 | UUUCAUAU C UGUAUAUA | 59 | UAUAUACA CUGAUGAG GCCGUUAGGC CGAA AUAUGAAA | 2248 | |
| 275 | AUAUCUGU A UAUAUAUA | 60 | UAUAUAUA CUGAUGAG GCCGUUAGGC CGAA ACAGAUAU | 2249 | |
| 277 | AUCUGUAU A UAUAUAAU | 61 | AUUAUAUA CUGAUGAG GCCGUUAGGC CGAA AUACAGAU | 2250 | |
| 279 | CUGUAUAU A UAUAAUGG | 62 | CCAUUAUA CUGAUGAG GCCGUUAGGC CGAA AUAUACAG | 2251 | |
| 281 | GUAUAUAU A UAAUGGUA | 63 | UACCAUUA CUGAUGAG GCCGUUAGGC CGAA AUAUAUAC | 2252 | |
| 283 | AUAUAUAU A AUGGUAAA | 64 | UUUACCAU CUGAUGAG GCCGUUAGGC CGAA AUAUAUAU | 2253 | |
| 289 | AUAAUGGU A AAGAAAGA | 65 | UCUUUCUU CUGAUGAG GCCGUUAGGC CGAA ACCAUUAU | 2254 | |
| 303 | AGACACCU U CGUAACCC | 66 | GGGUUACG CUGAUGAG GCCGUUAGGC CGAA AGGUGUCU | 2255 | |
| 304 | GACACCUU C GUAACCCG | 67 | CGGGUUAC CUGAUGAG GCCGUUAGGC CGAA AAGGUGUC | 2256 | |
| 307 | ACCUUCGU A ACCCGCAU | 68 | AUGCGGGU CUGAUGAG GCCGUUAGGC CGAA ACGAAGGU | 2257 | |
| 326 | ACCCGCAU U UUCCAAAG | 69 | CUUUGGAA CUGAUGAG GCCGUUAGGC CGAA AUGCGGGU | 2258 | |
| 317 | CCCGCAUU U UCCAAAGA | 70 | UCUUUGGA CUGAUGAG GCCGUUAGGC CGAA AAUGCGGG | 2259 | |
| 318 | CCGCAUUU U CCAAAGAG | 71 | CUCUUUGG CUGAUGAG GCCGUUAGGC CGAA AAAUGCGG | 2260 | |
| 319 | CGCAUUUU C CAAAGAGA | 72 | UCUCUUUG CUGAUGAG GCCGUUAGGC CGAA AAAAUGCG | 2261 | |
| 333 | AGAGGAAU C ACAGGGAG | 73 | CUCCCUGU CUGAUGAG GCCGUUAGGC CGAA AUUCCUCU | 2262 | |
| 346 | GGAGAUGU A CAGCAAUG | 74 | CAUUGCUG CUGAUGAG GCCGUUAGGC CGAA ACAUCUCC | 2263 | |
| 362 | GGGGCCAU U UAAGAGUU | 75 | AACUCUUA CUGAUGAG GCCGUUAGGC CGAA AUGGCCCC | 2264 | |
| 363 | GGGCCAUU U AAGAGUUC | 76 | GAACUCUU CUGAUGAG GCCGUUAGGC CGAA AAUGGCCC | 2265 | |
| 364 | GGCCAUUU A AGAGUUCU | 77 | AGAACUCU CUGAUGAG GCCGUUAGGC CGAA AAAUGGCC | 2266 | |
| 370 | UUAAGAGU U CUGUGUUC | 78 | GAACACAG CUGAUGAG GCCGUUAGGC CGAA ACUCUUAA | 2267 | |
| 371 | UAAGAGUU C UGUGUUCA | 79 | UGAACACA CUGAUGAG GCCGUUAGGC CGAA AACUCUUA | 2268 | |
| 377 | UUCUGUGU U CAUCUUGA | 80 | UCAAGAUG CUGAUGAG GCCGUUAGGC CGAA ACACAGAA | 2269 | |
| 378 | UCUGUGUU C AUCUUGAU | 81 | AUCAAGAU CUGAUGAG GCCGUUAGGC CGAA AACACAGA | 2270 | |
| 381 | GUGUUCAU C UUGAUUCU | 82 | AGAAUCAA CUGAUGAG GCCGUUAGGC CGAA AUGAACAC | 2271 | |
| 383 | GUUCAUCU U GAUUCUUC | 83 | GAAGAAUC CUGAUGAG GCCGUUAGGC CGAA AGAUGAAC | 2272 | |
| 387 | AUCUUGAU U CUUCACCU | 84 | AGGUGAAG CUGAUGAG GCCGUUAGGC CGAA AUCAAGAU | 2273 | |
| 388 | UCUUGAUU C UUCACCUU | 85 | AAGGUGAA CUGAUGAG GCCGUUAGGC CGAA AAUCAAGA | 2274 | |
| 390 | UUGAUUCU U CACCUUCU | 86 | AGAAGGUG CUGAUGAG GCCGUUAGGC CGAA AGAAUCAA | 2275 | |
| 391 | UGAUUCUU C ACCUUCUA | 87 | UAGAAGGU CUGAUGAG GCCGUUAGGC CGAA AAGAAUCA | 2276 | |
| 396 | CUUCACCU U CUAGAAGG | 88 | CCUUCUAG CUGAUGAG GCCGUUAGGC CGAA AGGUGAAG | 2277 | |
| 397 | UUCACCUU C UAGAAGGG | 89 | CCCUUCUA CUGAUGAG GCCGUUAGGC CGAA AAGGUGAA | 2278 | |
| 399 | CACCUUCU A GAAGGGGC | 90 | GCCCCUUC CUGAUGAG GCCGUUAGGC CGAA AGAAGGUG | 2279 | |
| 415 | CCCUGAGU A AUUCACUC | 91 | GAGUGAAU CUGAUGAG GCCGUUAGGC CGAA ACUCAGGG | 2280 | |
| 418 | UGAGUAAU U CACUCAUU | 92 | AAUGAGUG CUGAUGAG GCCGUUAGGC CGAA AUUACUCA | 2281 | |
| 419 | GAGUAAUU C ACUCAUUC | 93 | GAAUGAGU CUGAUGAG GCCGUUAGGC CGAA AAUUACUC | 2282 | |
| 423 | AAUUCACU C AUUCAGCU | 94 | AGCUGAAU CUGAUGAG GCCGUUAGGC CGAA AGUGAAUU | 2283 | |
| 426 | UCACUCAU U CAGCUGAA | 95 | UUCAGCUG CUGAUGAG GCCGUUAGGC CGAA AUGAGUGA | 2284 | |
| 427 | CACUCAUU C AGCUGAAC | 96 | GUUCAGCU CUGAUGAG GCCGUUAGGC CGAA AAUGAGUG | 2285 | |
| 446 | CAAUGGCU A UGAAGGCA | 97 | UGCCUUCA CUGAUGAG GCCGUUAGGC CGAA AGCCAUUG | 2286 | |
| 456 | GAAGGCAU U GUCGUUGC | 98 | GCAACGAC CUGAUGAG GCCGUUAGGC CGAA AUGCCUUC | 2287 | |
| 459 | GGCAUUGU C GUUGCAAU | 99 | AUUGCAAC CUGAUGAG GCCGUUAGGC CGAA ACAAUGCC | 2288 | |
| 462 | AUUGUCGU U GCAAUCGA | 100 | UCGAUUGC CUGAUGAG GCCGUUAGGC CGAA ACGACAAU | 2289 | |
| 468 | GUUGCAAU C GACCCCAA | 101 | UUGGGGUC CUGAUGAG GCCGUUAGGC CGAA AUUGCAAC | 2290 | |
| 498 | GAAACACU C AUUCAACA | 102 | UGUUGAAU CUGAUGAG GCCGUUAGGC CGAA AGUGUUUC | 2291 | |
| 501 | ACACUCAU U CAACAAAU | 103 | AUUUGUUG CUGAUGAG GCCGUUAGGC CGAA AUGAGUGU | 2292 | |
| 502 | CACUCAUU C AACAAAUA | 104 | UAUUUGUU CUGAUGAG GCCGUUAGGC CGAA AAUGAGUG | 2293 | |
| 510 | CAACAAAU A AAGGACAU | 105 | AUGUCCUU CUGAUGAG GCCGUUAGGC CGAA AUUUGUUG | 2294 | |
| 533 | CCAGGCAU C UCUGUAUC | 106 | GAUACAGA CUGAUGAG GCCGUUAGGC CGAA AUGCCUGG | 2295 | |
| 535 | AGGCAUCU C UGUAUCUG | 107 | CAGAUACA CUGAUGAG GCCGUUAGGC CGAA AGAUGCCU | 2296 | |
| 539 | AUCUCUGU A UCUGUUUG | 108 | CAAACAGA CUGAUGAG GCCGUUAGGC CGAA ACAGAGAU | 2297 | |
| 541 | CUCUGUAU C UGUUUGAA | 109 | UUCAAACA CUGAUGAG GCCGUUAGGC CGAA AUACAGAG | 2298 | |
| 545 | GUAUCUGU U UGAAGCUA | 110 | UAGCUUCA CUGAUGAG GCCGUUAGGC CGAA ACAGAUAC | 2299 | |
| 546 | UAUCUGUU U GAAGCUAC | 111 | GUAGCUUC CUGAUGAG GCCGUUAGGC CGAA AACAGAUA | 2300 | |
| 553 | UUGAAGCU A CAGGAAAG | 112 | CUUUCCUG CUGAUGAG GCCGUUAGGC CGAA AGCUUCAA | 2301 | |
| 566 | AAAGCGAU U UUAUUUCA | 113 | UGAAAUAA CUGAUGAG GCCGUUAGGC CGAA AUCGCUUU | 2302 | |
| 567 | AAGCGAUU U UAUUUCAA | 114 | UUGAAAUA CUGAUGAG GCCGUUAGGC CGAA AAUCGCUU | 2303 | |
| 568 | AGCGAUUU U AUUUCAAA | 115 | UUUGAAAU CUGAUGAG GCCGUUAGGC CGAA AAAUCGCU | 2304 | |
| 569 | GCGAUUUU A UUUCAAAA | 116 | UUUUGAAA CUGAUGAG GCCGUUAGGC CGAA AAAAUCGC | 2305 | |
| 571 | GAUUUUAU U UCAAAAAU | 117 | AUUUUUGA CUGAUGAG GCCGUUAGGC CGAA AUAAAAUC | 2306 | |
| 572 | AUUUUAUU U CAAAAAUG | 118 | CAUUUUUG CUGAUGAG GCCGUUAGGC CGAA AAUAAAAU | 2307 | |
| 573 | UUUUAUUU C AAAAAUGU | 119 | ACAUUUUU CUGAUGAG GCCGUUAGGC CGAA AAAUAAAA | 2308 | |
| 582 | AAAAAUGU U GCCAUUUU | 120 | AAAAUGGC CUGAUGAG GCCGUUAGGC CGAA ACAUUUUU | 2309 | |
| 588 | GUUGCCAU U UUGAUUCC | 121 | GGAAUCAA CUGAUGAG GCCGUUAGGC CGAA AUGGCAAC | 2310 | |
| 589 | UUGCCAUU U UGAUUCCU | 122 | AGGAAUCA CUGAUGAG GCCGUUAGGC CGAA AAUGGCAA | 2311 | |
| 590 | UGCCAUUU U GAUUCCUG | 123 | CAGGAAUC CUGAUGAG GCCGUUAGGC CGAA AAAUGGCA | 2312 | |
| 594 | AUUUUGAU U CCUGAAAC | 124 | GUUUCAGG CUGAUGAG GCCGUUAGGC CGAA AUCAAAAU | 2313 | |
| 595 | UUUUGAUU C CUGAAACA | 125 | UGUUUCAG CUGAUGAG GCCGUUAGGC CGAA AAUCAAAA | 2314 | |
| 623 | GGCUGACU A UGUGAGAC | 126 | GUCUCACA CUGAUGAG GCCGUUAGGC CGAA AGUCAGCC | 2315 | |
| 639 | CCAAAACU U GAGACCUA | 127 | UAGGUCUC CUGAUGAG GCCGUUAGGC CGAA AGUUUUGG | 2316 | |
| 647 | UGAGACCU A CAAAAAUG | 128 | CAUUUUUG CUGAUGAG GCCGUUAGGC CGAA AGGUCUCA | 2317 | |
| 663 | GCUGAUGU U CUGGUUGC | 129 | GCAACCAG CUGAUGAG GCCGUUAGGC CGAA ACAUCAGC | 2318 | |
| 664 | CUGAUGUU C UGGUUGCU | 130 | AGCAACCA CUGAUGAG GCCGUUAGGC CGAA AACAUCAG | 2319 | |
| 669 | GUUCUGGU U GCUGAGUC | 131 | GACUCAGC CUGAUGAG GCCGUUAGGC CGAA ACCAGAAC | 2320 | |
| 677 | UGCUGAGU C UACUCCUC | 132 | GAGGAGUA CUGAUGAG GCCGUUAGGC CGAA ACUCAGCA | 2321 | |
| 679 | CUGAGUCU A CUCCUCCA | 133 | UGGAGGAG CUGAUGAG GCCGUUAGGC CGAA AGACUCAG | 2322 | |
| 682 | AGUCUACU C CUCCAGGU | 134 | ACCUGGAG CUGAUGAG GCCGUUAGGC CGAA AGUAGACU | 2323 | |
| 685 | CUACUCCU C CAGGUAAU | 135 | AUUACCUG CUGAUGAG GCCGUUAGGC CGAA AGGAGUAG | 2324 | |
| 691 | CUCCAGGU A AUGAUGAA | 136 | UUCAUCAU CUGAUGAG GCCGUUAGGC CGAA ACCUGGAG | 2325 | |
| 704 | UGAACCCU A CACUGAGC | 137 | GCUCAGUG CUGAUGAG GCCGUUAGGC CGAA AGGGUUCA | 2326 | |
| 747 | GAAAGGAU C CACCUCAC | 138 | GUGAGGUG CUGAUGAG GCCGUUAGGC CGAA AUCCUUUC | 2327 | |
| 753 | AUCCACCU C ACUCCUGA | 139 | UCAGGAGU CUGAUGAG GCCGUUAGGC CGAA AGGUGGAU | 2328 | |
| 757 | ACCUCACU C CUGAUUUC | 140 | GAAAUCAG CUGAUGAG GCCGUUAGGC CGAA AGUGAGGU | 2329 | |
| 763 | CUCCUGAU U UCAUUGCA | 141 | UGCAAUGA CUGAUGAG GCCGUUAGGC CGAA AUCAGGAG | 2330 | |
| 764 | UCCUGAUU U CAUUGCAG | 142 | CUGCAAUG CUGAUGAG GCCGUUAGGC CGAA AAUCAGGA | 2331 | |
| 765 | CCUGAUUU C AUUGCAGG | 143 | CCUGCAAU CUGAUGAG GCCGUUAGGC CGAA AAAUCAGG | 2332 | |
| 768 | GAUUUCAU U GCAGGAAA | 144 | UUUCCUGC CUGAUGAG GCCGUUAGGC CGAA AUGAAAUC | 2333 | |
| 782 | AAAAAAGU U AGCUGAAU | 145 | AUUCAGCU CUGAUGAG GCCGUUAGGC CGAA ACUUUUUU | 2334 | |
| 783 | AAAAAGUU A GCUGAAUA | 146 | UAUUCAGC CUGAUGAG GCCGUUAGGC CGAA AACUUUUU | 2335 | |
| 791 | AGCUGAAU A UGGACCAC | 147 | GUGGUCCA CUGAUGAG GCCGUUAGGC CGAA AUUCAGCU | 2336 | |
| 805 | CACAAGGU A AGGCAUUU | 148 | AAAUGCCU CUGAUGAG GCCGUUAGGC CGAA ACCUUGUG | 2337 | |
| 812 | UAAGGCAU U UGUCCAUG | 149 | CAUGGACA CUGAUGAG GCCGUUAGGC CGAA AUGCCUUA | 2338 | |
| 813 | AAGGCAUU U GUCCAUGA | 150 | UCAUGGAC CUGAUGAG GCCGUUAGGC CGAA AAUGCCUU | 2339 | |
| 816 | GCAUUUGU C CAUGAGUG | 151 | CACUCAUG CUGAUGAG GCCGUUAGGC CGAA ACAAAUGC | 2340 | |
| 829 | AGUGGGCU C AUCUACGA | 152 | UCGUAGAU CUGAUGAG GCCGUUAGGC CGAA AGCCCACU | 2341 | |
| 832 | GGGCUCAU C UACGAUGG | 153 | CCAUCGUA CUGAUGAG GCCGUUAGGC CGAA AUGAGCCC | 2342 | |
| 834 | GCUCAUCU A CGAUGGGG | 154 | CCCCAUCG CUGAUGAG GCCGUUAGGC CGAA AGAUGAGC | 2343 | |
| 846 | UGGGGAGU A UUUGACGA | 155 | UCGUCAAA CUGAUGAG GCCGUUAGGC CGAA ACUCCCCA | 2344 | |
| 848 | GGGAGUAU U UGACGAGU | 156 | ACUCGUCA CUGAUGAG GCCGUUAGGC CGAA AUACUCCC | 2345 | |
| 849 | GGAGUAUU U GACGAGUA | 157 | UACUCGUC CUGAUGAG GCCGUUAGGC CGAA AAUACUCC | 2346 | |
| 857 | UGACGAGU A CAAUAAUG | 158 | CAUUAUUG CUGAUGAG GCCGUUAGGC CGAA ACUCGUCA | 2347 | |
| 862 | AGUACAAU A AUGAUGAG | 159 | CUCAUCAU CUGAUGAG GCCGUUAGGC CGAA AUUGUACU | 2348 | |
| 875 | UGAGAAAU U CUACUUAU | 160 | AUAAGUAG CUGAUGAG GCCGUUAGGC CGAA AUUUCUCA | 2349 | |
| 876 | GAGAAAUU C UACUUAUC | 161 | GAUAAGUA CUGAUGAG GCCGUUAGGC CGAA AAUUUCUC | 2350 | |
| 878 | GAAAUUCU A CUUAUCCA | 162 | UGGAUAAG CUGAUGAG GCCGUUAGGC CGAA AGAAUUUC | 2351 | |
| 881 | AUUCUACU U AUCCAAUG | 163 | CAUUGGAU CUGAUGAG GCCGUUAGGC CGAA AGUAGAAU | 2352 | |
| 882 | UUCUACUU A UCCAAUGG | 164 | CCAUUGGA CUGAUGAG GCCGUUAGGC CGAA AAGUAGAA | 2353 | |
| 884 | CUACUUAU C CAAUGGAA | 165 | UUCCAUUG CUGAUGAG GCCGUUAGGC CGAA AUAAGUAG | 2354 | |
| 897 | GGAAGAAU A CAAGCAGU | 166 | ACUGCUUG CUGAUGAG GCCGUUAGGC CGAA AUUCUUCC | 2355 | |
| 906 | CAAGCAGU A AGAUGUUC | 167 | GAACAUCU CUGAUGAG GCCGUUAGGC CGAA ACUGCUUG | 2356 | |
| 913 | UAAGAUGU U CAGCAGGU | 168 | ACCUGCUG CUGAUGAG GCCGUUAGGC CGAA ACAUCUUA | 2357 | |
| 914 | AAGAUGUU C AGCAGGUA | 169 | UACCUGCU CUGAUGAG GCCGUUAGGC CGAA AACAUCUU | 2358 | |
| 922 | CAGCAGGU A UUACUGGU | 170 | ACCAGUAA CUGAUGAG GCCGUUAGGC CGAA ACCUGCUG | 2359 | |
| 924 | GCAGGUAU U ACUGGUAC | 171 | GUACCAGU CUGAUGAG GCCGUUAGGC CGAA AUACCUGC | 2360 | |
| 925 | CAGGUAUU A CUGGUACA | 172 | UGUACCAG CUGAUGAG GCCGUUAGGC CGAA AAUACCUG | 2361 | |
| 931 | UUACUGGU A CAAAUGUA | 173 | UACAUUUG CUGAUGAG GCCGUUAGGC CGAA ACCAGUAA | 2362 | |
| 939 | ACAAAUGU A GUAAAGAA | 174 | UUCUUUAC CUGAUGAG GCCGUUAGGC CGAA ACAUUUGU | 2363 | |
| 942 | AAUGUAGU A AAGAAGUG | 175 | CACUUCUU CUGAUGAG GCCGUUAGGC CGAA ACUACAUU | 2364 | |
| 952 | AGAAGUGU C AGGGAGGC | 176 | GCCUCCCU CUGAUGAG GCCGUUAGGC CGAA ACACUUCU | 2365 | |
| 967 | GCAGCUGU U ACACCAAA | 177 | UUUGGUGU CUGAUGAG GCCGUUAGGC CGAA ACAGCUGC | 2366 | |
| 968 | CAGCUGUU A CACCAAAA | 178 | UUUUGGUG CUGAUGAG GCCGUUAGGC CGAA AACAGCUG | 2367 | |
| 986 | AUGCACAU U CAAUAAAG | 179 | CUUUAUUG CUGAUGAG GCCGUUAGGC CGAA AUGUGCAU | 2368 | |
| 987 | UGCACAUU C AAUAAAGU | 180 | ACUUUAUU CUGAUGAG GCCGUUAGGC CGAA AAUGUGCA | 2369 | |
| 991 | CAUUCAAU A AAGUUACA | 181 | UGUAACUU CUGAUGAG GCCGUUAGGC CGAA AUUGAAUG | 2370 | |
| 996 | AAUAAAGU U ACAGGACU | 182 | AGUCCUGU CUGAUGAG GCCGUUAGGC CGAA ACUUUAUU | 2371 | |
| 997 | AUAAAGUU A CAGGACUC | 183 | GAGUCCUG CUGAUGAG GCCGUUAGGC CGAA AACUUUAU | 2372 | |
| 1005 | ACAGGACU C UAUGAAAA | 184 | UUUUCAUA CUGAUGAG GCCGUUAGGC CGAA AGUCCUGU | 2373 | |
| 1007 | AGGACUCU A UGAAAAAG | 185 | CUUUUUCA CUGAUGAG GCCGUUAGGC CGAA AGAGUCCU | 2374 | |
| 1025 | AUGUGAGU U UGUUCUCC | 186 | GGAGAACA CUGAUGAG GCCGUUAGGC CGAA ACUCACAU | 2375 | |
| 1026 | UGUGAGUU U GUUCUCCA | 187 | UGGAGAAC CUGAUGAG GCCGUUAGGC CGAA AACUCACA | 2376 | |
| 1029 | GAGUUUGU U CUCCAAUC | 188 | GAUUGGAG CUGAUGAG GCCGUUAGGC CGAA ACAAACUC | 2377 | |
| 1030 | AGUUUGUU C UCCAAUCC | 189 | GGAUUGGA CUGAUGAG GCCGUUAGGC CGAA AACAAACU | 2378 | |
| 1032 | UUUGUUCU C CAAUCCCG | 190 | CGGGAUUG CUGAUGAG GCCGUUAGGC CGAA AGAACAAA | 2379 | |
| 1037 | UCUCCAAU C CCGCCAGA | 191 | UCUGGCGG CUGAUGAG GCCGUUAGGC CGAA AUUGGAGA | 2380 | |
| 1057 | AGAAGGCU U CUAUAAUG | 192 | CAUUAUAG CUGAUGAG GCCGUUAGGC CGAA AGCCUUCU | 2381 | |
| 1058 | GAAGGCUU C UAUAAUGU | 193 | ACAUUAUA CUGAUGAG GCCGUUAGGC CGAA AAGCCUUC | 2382 | |
| 1060 | AGGCUUCU A UAAUGUUU | 194 | AAACAUUA CUGAUGAG GCCGUUAGGC CGAA AGAAGCCU | 2383 | |
| 1062 | GCUUCUAU A AUGUUUGC | 195 | GCAAACAU CUGAUGAG GCCGUUAGGC CGAA AUAGAAGC | 2384 | |
| 1067 | UAUAAUGU U UGCACAAC | 196 | GUUGUGCA CUGAUGAG GCCGUUAGGC CGAA ACAUUAUA | 2385 | |
| 1068 | AUAAUGUU U GCACAACA | 197 | UGUUGUGC CUGAUGAG GCCGUUAGGC CGAA AACAUUAU | 2386 | |
| 1080 | CAACAUGU U GAUUCUAU | 198 | AUAGAAUC CUGAUGAG GCCGUUAGGC CGAA ACAUGUUG | 2387 | |
| 1084 | AUGUUGAU U CUAUAGUU | 199 | AACUAUAG CUGAUGAG GCCGUUAGGC CGAA AUCAACAU | 2388 | |
| 1085 | UGUUGAUU C UAUAGUUG | 200 | CAACUAUA CUGAUGAG GCCGUUAGGC CGAA AAUCAACA | 2389 | |
| 1087 | UUGAUUCU A UAGUUGAA | 201 | UUCAACUA CUGAUGAG GCCGUUAGGC CGAA AGAAUCAA | 2390 | |
| 1089 | GAUUCUAU A GUUGAAUU | 202 | AAUUCAAC CUGAUGAG GCCGUUAGGC CGAA AUAGAAUC | 2391 | |
| 1092 | UCUAUAGU U GAAUUCUG | 203 | CAGAAUUC CUGAUGAG GCCGUUAGGC CGAA ACUAUAGA | 2392 | |
| 1097 | AGUUGAAU U CUGUACAG | 204 | CUGUACAG CUGAUGAG GCCGUUAGGC CGAA AUUCAACU | 2393 | |
| 1098 | GUUGAAUU C UGUACAGA | 205 | UCUGUACA CUGAUGAG GCCGUUAGGC CGAA AAUUCAAC | 2394 | |
| 1102 | AAUUCUGU A CAGAACAA | 206 | UUGUUCUG CUGAUGAG GCCGUUAGGC CGAA ACAGAAUU | 2395 | |
| 1129 | AAGAAGCU C CAAACAAG | 207 | CUUGUUUG CUGAUGAG GCCGUUAGGC CGAA AGCUUCUU | 2396 | |
| 1144 | AGCAAAAU C AAAAAUGC | 208 | GCAUUUUU CUGAUGAG GCCGUUAGGC CGAA AUUUUGCU | 2397 | |
| 1156 | AAUGCAAU C UCCGAAGC | 209 | GCUUCGGA CUGAUGAG GCCGUUAGGC CGAA AUUGCAUU | 2398 | |
| 1158 | UGCAAUCU C CGAAGCAC | 210 | GUGCUUCG CUGAUGAG GCCGUUAGGC CGAA AGAUUGCA | 2399 | |
| 1179 | GAAGUGAU C CGUGAUUC | 211 | GAAUCACG CUGAUGAG GCCGUUAGGC CGAA AUCACUUC | 2400 | |
| 1186 | UCCGUGAU U CUGAGGAC | 212 | GUCCUCAG CUGAUGAG GCCGUUAGGC CGAA AUCACGGA | 2401 | |
| 1187 | CCGUGAUU C UGAGGACU | 213 | AGUCCUCA CUGAUGAG GCCGUUAGGC CGAA AAUCACGG | 2402 | |
| 1196 | UGAGGACU U UAAGAAAA | 214 | UUUUCUUA CUGAUGAG GCCGUUAGGC CGAA AGUCCUCA | 2403 | |
| 1197 | GAGGACUU U AAGAAAAC | 215 | GUUUUCUU CUGAUGAG GCCGUUAGGC CGAA AAGUCCUC | 2404 | |
| 1198 | AGGACUUU A AGAAAACC | 216 | GGUUUUCU CUGAUGAG GCCGUUAGGC CGAA AAAGUCCU | 2405 | |
| 1210 | AAACCACU C CUAUGACA | 217 | UGUCAUAG CUGAUGAG GCCGUUAGGC CGAA AGUGGUUU | 2406 | |
| 1213 | CCACUCCU A UGACAACA | 218 | UGUUGUCA CUGAUGAG GCCGUUAGGC CGAA AGGAGUGG | 2407 | |
| 1234 | CACCAAAU C CCACCUUC | 219 | GAAGGUGG CUGAUGAG GCCGUUAGGC CGAA AUUUGGUG | 2408 | |
| 1241 | UCCCACCU U CUCAUUGC | 220 | GCAAUGAG CUGAUGAG GCCGUUAGGC CGAA AGGUGGGA | 2409 | |
| 1242 | CCCACCUU C UCAUUGCU | 221 | AGCAAUGA CUGAUGAG GCCGUUAGGC CGAA AAGGUGGG | 2410 | |
| 1244 | CACCUUCU C AUUGCUGC | 222 | GCAGCAAU CUGAUGAG GCCGUUAGGC CGAA AGAAGGUG | 2411 | |
| 1247 | CUUCUCAU U GCUGCAGA | 223 | UCUGCAGC CUGAUGAG GCCGUUAGGC CGAA AUGAGAAG | 2412 | |
| 1257 | CUGCAGAU U GGACAAAG | 224 | CUUUGUCC CUGAUGAG GCCGUUAGGC CGAA AUCUGCAG | 2413 | |
| 1269 | CAAAGAAU U GUGUGUUU | 225 | AAACACAC CUGAUGAG GCCGUUAGGC CGAA AUUCUUUG | 2414 | |
| 1276 | UUGUGUGU U UAGUCCUU | 226 | AAGGACUA CUGAUGAG GCCGUUAGGC CGAA ACACACAA | 2415 | |
| 1277 | UGUGUGUU U AGUCCUUG | 227 | CAAGGACU CUGAUGAG GCCGUUAGGC CGAA AACACACA | 2416 | |
| 1278 | GUGUGUUU A GUCCUUGA | 228 | UCAAGGAC CUGAUGAG GCCGUUAGGC CGAA AAACACAC | 2417 | |
| 1281 | UGUUUAGU C CUUGACAA | 229 | UUGUCAAG CUGAUGAG GCCGUUAGGC CGAA ACUAAACA | 2418 | |
| 1284 | UUAGUCCU U GACAAAUC | 230 | GAUUUGUC CUGAUGAG GCCGUUAGGC CGAA AGGACUAA | 2419 | |
| 1292 | UGACAAAU C UGGAAGCA | 231 | UGCUUCCA CUGAUGAG GCCGUUAGGC CGAA AUUUGUCA | 2420 | |
| 1312 | CGACUGGU A ACCGCCUC | 232 | GAGGCGGU CUGAUGAG GCCGUUAGGC CGAA ACCAGUCG | 2421 | |
| 1320 | AACCGCCU C AAUCGACU | 233 | AGUCGAUU CUGAUGAG GCCGUUAGGC CGAA AGGCGGUU | 2422 | |
| 1324 | GCCUCAAU C GACUGAAU | 234 | AUUCAGUC CUGAUGAG GCCGUUAGGC CGAA AUUGAGGC | 2423 | |
| 1333 | GACUGAAU C AAGCAGGC | 235 | GCCUGCUU CUGAUGAG GCCGUUAGGC CGAA AUUCAGUC | 2424 | |
| 1347 | GGCCAGCU U UUCCUGCU | 236 | AGCAGGAA CUGAUGAG GCCGUUAGGC CGAA AGCUGGCC | 2425 | |
| 1348 | GCCAGCUU U UCCUGCUG | 237 | CAGCAGGA CUGAUGAG GCCGUUAGGC CGAA AAGCUGGC | 2426 | |
| 1349 | CCAGCUUU U CCUGCUGC | 238 | GCAGCAGG CUGAUGAG GCCGUUAGGC CGAA AAAGCUGG | 2427 | |
| 1350 | CAGCUUUU C CUGCUGCA | 239 | UGCAGCAG CUGAUGAG GCCGUUAGGC CGAA AAAAGCUG | 2428 | |
| 1365 | CAGACAGU U GAGCUGGG | 240 | CCCAGCUC CUGAUGAG GCCGUUAGGC CGAA ACUGUCUG | 2429 | |
| 1376 | GCUGGGGU C CUGGGUUG | 241 | CAACCCAG CUGAUGAG GCCGUUAGGC CGAA ACCCCAGC | 2430 | |
| 1383 | UCCUGGGU U GGGAUGGU | 242 | ACCAUCCC CUGAUGAG GCCGUUAGGC CGAA ACCCAGGA | 2431 | |
| 1397 | GGUGACAU U UGACAGUG | 243 | CACUGUCA CUGAUGAG GCCGUUAGGC CGAA AUGUCACC | 2432 | |
| 1398 | GUGACAUU U GACAGUGC | 244 | GCACUGUC CUGAUGAG GCCGUUAGGC CGAA AAUGUCAC | 2433 | |
| 1416 | GCCCAUGU A CAAAGUGA | 245 | UCACUUUG CUGAUGAG GCCGUUAGGC CGAA ACAUGGGC | 2434 | |
| 1428 | AGUGAACU C AUACAGAU | 246 | AUCUGUAU CUGAUGAG GCCGUUAGGC CGAA AGUUCACU | 2435 | |
| 1431 | GAACUCAU A CAGAUAAA | 247 | UUUAUCUG CUGAUGAG GCCGUUAGGC CGAA AUGAGUUC | 2436 | |
| 1437 | AUACAGAU A AACAGUGG | 248 | CCACUGUU CUGAUGAG GCCGUUAGGC CGAA AUCUGUAU | 2437 | |
| 1464 | GACACACU C GCCAAAAG | 249 | CUUUUGGC CUGAUGAG GCCGUUAGGC CGAA AGUGUGUC | 2438 | |
| 1475 | CAAAAGAU U ACCUGCAG | 250 | CUGCAGGU CUGAUGAG GCCGUUAGGC CGAA AUCUUUUG | 2439 | |
| 1476 | AAAAGAUU A CCUGCAGC | 251 | GCUGCAGG CUGAUGAG GCCGUUAGGC CGAA AAUCUUUU | 2440 | |
| 1489 | CAGCAGCU U CAGGAGGG | 252 | CCCUCCUG CUGAUGAG GCCGUUAGGC CGAA AGCUGCUG | 2441 | |
| 1490 | AGCAGCUU C AGGAGGGA | 253 | UCCCUCCU CUGAUGAG GCCGUUAGGC CGAA AAGCUGCU | 2442 | |
| 1502 | AGGGACGU C CAUCUGCA | 254 | UGCAGAUG CUGAUGAG GCCGUUAGGC CGAA ACGUCCCU | 2443 | |
| 1506 | ACGUCCAU C UGCAGCGG | 255 | CCGCUGCA CUGAUGAG GCCGUUAGGC CGAA AUGGACGU | 2444 | |
| 1518 | AGCGGGCU U CGAUCGGC | 256 | GCCGAUCG CUGAUGAG GCCGUUAGGC CGAA AGCCCGCU | 2445 | |
| 1519 | GCGGGCUU C GAUCGGCA | 257 | UGCCGAUC CUGAUGAG GCCGUUAGGC CGAA AAGCCCGC | 2446 | |
| 1523 | GCUUCGAU C GGCAUUUA | 258 | UAAAUGCC CUGAUGAG GCCGUUAGGC CGAA AUCGAAGC | 2447 | |
| 1529 | AUCGGCAU U UACUGUGA | 259 | UCACAGUA CUGAUGAG GCCGUUAGGC CGAA AUGCCGAU | 2448 | |
| 1530 | UCGGCAUU U ACUGUGAU | 260 | AUCACAGU CUGAUGAG GCCGUUAGGC CGAA AAUGCCGA | 2449 | |
| 1531 | CGGCAUUU A CUGUGAUU | 261 | AAUCACAG CUGAUGAG GCCGUUAGGC CGAA AAAUGCCG | 2450 | |
| 1539 | ACUGUGAU U AGGAAGAA | 262 | UUCUUCCU CUGAUGAG GCCGUUAGGC CGAA AUCACAGU | 2451 | |
| 1540 | CUGUGAUU A GGAAGAAA | 263 | UUUCUUCC CUGAUGAG GCCGUUAGGC CGAA AAUCACAG | 2452 | |
| 1550 | GAAGAAAU A UCCAACUG | 264 | CAGUUGGA CUGAUGAG GCCGUUAGGC CGAA AUUUCUUC | 2453 | |
| 1552 | AGAAAUAU C CAACUGAU | 265 | AUCAGUUG CUGAUGAG GCCGUUAGGC CGAA AUAUUUCU | 2454 | |
| 1565 | UGAUGGAU C UGAAAUUG | 266 | CAAUUUCA CUGAUGAG GCCGUUAGGC CGAA AUCCAUCA | 2455 | |
| 1572 | UCUGAAAU U GUGCUGCU | 267 | AGCAGCAC CUGAUGAG GCCGUUAGGC CGAA AUUUCAGA | 2456 | |
| 1603 | ACAACACU A UAAGUGGG | 268 | CCCACUUA CUGAUGAG GCCGUUAGGC CGAA AGUGUUGU | 2457 | |
| 1605 | AACACUAU A AGUGGGUG | 269 | CACCCACU CUGAUGAG GCCGUUAGGC CGAA AUAGUGUU | 2458 | |
| 1616 | UGGGUGCU U UAACGAGG | 270 | CCUCGUUA CUGAUGAG GCCGUUAGGC CGAA AGCACCCA | 2459 | |
| 1617 | GGGUGCUU U AACGAGGU | 271 | ACCUCGUU CUGAUGAG GCCGUUAGGC CGAA AAGCACCC | 2460 | |
| 1618 | GGUGCUUU A ACGAGGUC | 272 | GACCUCGU CUGAUGAG GCCGUUAGGC CGAA AAAGCACC | 2461 | |
| 1626 | AACGAGGU C AAACAAAG | 273 | CUUUGUUU CUGAUGAG GCCGUUAGGC CGAA ACCUCGUU | 2462 | |
| 1644 | GGUGCCAU C AUCCACAC | 274 | GUGUGGAU CUGAUGAG GCCGUUAGGC CGAA AUGGCACC | 2463 | |
| 1647 | GCCAUCAU C CACACAGU | 275 | ACUGUGUG CUGAUGAG GCCGUUAGGC CGAA AUGAUGGC | 2464 | |
| 1656 | CACACAGU C GCUUUGGG | 276 | CCCAAAGC CUGAUGAG GCCGUUAGGC CGAA ACUGUGUG | 2465 | 2465 |
| 1660 | CAGUCGCU U UGGGGCCC | 277 | GGGCCCCA CUGAUGAG GCCGUUAGGC CGAA AGCGACUG | 2466 | |
| 1661 | AGUCGCUU U GGGGCCCU | 278 | AGGGCCCC CUGAUGAG GCCGUUAGGC CGAA AAGCGACU | 2467 | |
| 1670 | GGGGCCCU C UGCAGCUC | 279 | GAGCUGCA CUGAUGAG GCCGUUAGGC CGAA AGGGCCCC | 2468 | |
| 1678 | CUGCAGCU C AAGAACUA | 280 | UAGUUCUU CUGAUGAG GCCGUUAGGC CGAA AGCUGCAG | 2469 | |
| 1686 | CAAGAACU A GAGGAGCU | 281 | AGCUCCUC CUGAUGAG GCCGUUAGGC CGAA AGUUCUUG | 2470 | |
| 1697 | GGAGCUGU C CAAAAUGA | 282 | UCAUUUUG CUGAUGAG GCCGUUAGGC CGAA ACAGCUCC | 2471 | |
| 1714 | CAGGAGGU U UACAGACA | 283 | UGUCUGUA CUGAUGAG GCCGUUAGGC CGAA ACCUCCUG | 2472 | |
| 1715 | AGGAGGUU U ACAGACAU | 284 | AUGUCUGU CUGAUGAG GCCGUUAGGC CGAA AACCUCCU | 2473 | |
| 1716 | GGAGGUUU A CAGACAUA | 285 | UAUGUCUG CUGAUGAG GCCGUUAGGC CGAA AAACCUCC | 2474 | |
| 1724 | ACAGACAU A UGCUUCAG | 286 | CUGAAGCA CUGAUGAG GCCGUUAGGC CGAA AUGUCUGU | 2475 | |
| 1729 | CAUAUGCU U CAGAUCAA | 287 | UUGAUCUG CUGAUGAG GCCGUUAGGC CGAA AGCAUAUG | 2476 | |
| 1730 | AUAUGCUU C AGAUCAAG | 288 | CUUGAUCU CUGAUGAG GCCGUUAGGC CGAA AAGCAUAU | 2477 | |
| 1735 | CUUCAGAU C AAGUUCAG | 289 | CUGAACUU CUGAUGAG GCCGUUAGGC CGAA AUCUGAAG | 2478 | |
| 1740 | GAUCAAGU U CAGAACAA | 290 | UUGUUCUG CUGAUGAG GCCGUUAGGC CGAA ACUUGAUC | 2479 | |
| 1741 | AUCAAGUU C AGAACAAU | 291 | AUUGUUCU CUGAUGAG GCCGUUAGGC CGAA AACUUGAU | 2480 | |
| 1755 | AAUGGCCU C AUUGAUGC | 292 | GCAUCAAU CUGAUGAG GCCGUUAGGC CGAA AGGCCAUU | 2481 | |
| 1758 | GGCCUCAU U GAUGCUUU | 293 | AAAGCAUC CUGAUGAG GCCGUUAGGC CGAA AUGAGGCC | 2482 | |
| 1765 | UUGAUGCU U UUGGGGCC | 294 | GGCCCCAA CUGAUGAG GCCGUUAGGC CGAA AGCAUCAA | 2483 | |
| 1766 | UGAUGCUU U UGGGGCCC | 295 | GGGCCCCA CUGAUGAG GCCGUUAGGC CGAA AAGCAUCA | 2484 | |
| 1767 | GAUGCUUU U GGGGCCCU | 296 | AGGGCCCC CUGAUGAG GCCGUUAGGC CGAA AAAGCAUC | 2485 | |
| 1776 | GGGGCCCU U UCAUCAGG | 297 | CCUGAUGA CUGAUGAG GCCGUUAGGC CGAA AGGGCCCC | 2486 | |
| 1777 | GGGCCCUU U CAUCAGGA | 298 | UCCUGAUG CUGAUGAG GCCGUUAGGC CGAA AAGGGCCC | 2487 | |
| 1778 | GGCCCUUU C AUCAGGAA | 299 | UUCCUGAU CUGAUGAG GCCGUUAGGC CGAA AAAGGGCC | 2488 | |
| 1781 | CCUUUCAU C AGGAAAUG | 300 | CAUUUCCU CUGAUGAG GCCGUUAGGC CGAA AUGAAAGG | 2489 | |
| 1797 | GGAGCUGU C UCUCAGCG | 301 | CGCUGAGA CUGAUGAG GCCGUUAGGC CGAA ACAGCUCC | 2490 | |
| 1799 | AGCUGUCU C UCAGCGCU | 302 | AGCGCUGA CUGAUGAG GCCGUUAGGC CGAA AGACAGCU | 2491 | |
| 1801 | CUGUCUCU C AGCGCUCC | 303 | GGAGCGCU CUGAUGAG GCCGUUAGGC CGAA AGAGACAG | 2492 | |
| 1808 | UCAGCGCU C CAUCCAGC | 304 | GCUGGAUG CUGAUGAG GCCGUUAGGC CGAA AGCGCUGA | 2493 | |
| 1812 | CGCUCCAU C CAGCUUGA | 305 | UCAAGCUG CUGAUGAG GCCGUUAGGC CGAA AUGGAGCG | 2494 | |
| 1818 | AUCCAGCU U GAGAGUAA | 306 | UUACUCUC CUGAUGAG GCCGUUAGGC CGAA AGCUGGAU | 2495 | |
| 1825 | UUGAGAGU A AGGGAUUA | 307 | UAAUCCCU CUGAUGAG GCCGUUAGGC CGAA ACUCUCAA | 2496 | |
| 1832 | UAAGGGAU U AACCCUCC | 308 | GGAGGGUU CUGAUGAG GCCGUUAGGC CGAA AUCCCUUA | 2497 | |
| 1833 | AAGGGAUU A ACCCUCCA | 309 | UGGAGGGU CUGAUGAG GCCGUUAGGC CGAA AAUCCCUU | 2498 | |
| 1839 | UUAACCCU C CAGAACAG | 310 | CUGUUCUG CUGAUGAG GCCGUUAGGC CGAA AGGGUUAA | 2499 | |
| 1872 | ACAGUGAU C GUGGACAG | 311 | CUGUCCAC CUGAUGAG GCCGUUAGGC CGAA AUCACUGU | 2500 | |
| 1900 | AGGACACU U UGUUUCUU | 312 | AAGAAACA CUGAUGAG GCCGUUAGGC CGAA AGUGUCCU | 2501 | |
| 1901 | GGACACUU U GUUUCUUA | 313 | UAAGAAAC CUGAUGAG GCCGUUAGGC CGAA AACUGUCC | 2502 | |
| 1904 | CACUUUGU U UCUUAUCA | 314 | UGAUAAGA CUGAUGAG GCCGUUAGGC CGAA ACAAAGUG | 2503 | |
| 1905 | ACUUUGUU U CUUAUCAC | 315 | GUGAUAAG CUGAUGAG GCCGUUAGGC CGAA AACAAAGU | 2504 | |
| 1906 | CUUUGUUU C UUAUCACC | 316 | GGUGAUAA CUGAUGAG GCCGUUAGGC CGAA AAACAAAG | 2505 | |
| 1908 | UUGUUUCU U AUCACCUG | 317 | CAGGUGAU CUGAUGAG GCCGUUAGGC CGAA AGAAACAA | 2506 | |
| 1909 | UGUUUCUU A UCACCUGG | 318 | CCAGGUGA CUGAUGAG GCCGUUAGGC CGAA AAGAAACA | 2507 | |
| 1911 | UUUCUUAU C ACCUGGAC | 319 | GUCCAGGU CUGAUGAG GCCGUUAGGC CGAA AUAAGAAA | 2508 | |
| 1930 | CGCAGCCU C CCCAAAUC | 320 | GAUUUGGG CUGAUGAG GCCGUUAGGC CGAA AGGCUGCG | 2509 | |
| 1938 | CCCCAAAU C CUUCUCUG | 321 | CAGAGAAG CUGAUGAG GCCGUUAGGC CGAA AUUUGGGG | 2510 | |
| 1941 | CAAAUCCU U CUCUGGGA | 322 | UCCCAGAG CUGAUGAG GCCGUUAGGC CGAA AGGAUUUG | 2511 | |
| 1942 | AAAUCCUU C UCUGGGAU | 323 | AUCCCAGA CUGAUGAG GCCGUUAGGC CGAA AAGGAUUU | 2512 | |
| 1944 | AUCCUUCU C UGGGAUCC | 324 | GGAUCCCA CUGAUGAG GCCGUUAGGC CGAA AGAAGGAU | 2513 | |
| 1951 | UCUGGGAU C CCAGUGGA | 325 | UCCACUGG CUGAUGAG GCCGUUAGGC CGAA AUCCCAGA | 2514 | |
| 1976 | AGGUGGCU U UGUAGUGG | 326 | CCACUACA CUGAUGAG GCCGUUAGGC CGAA AGCCACCU | 2515 | |
| 1977 | GGUGGCUU U GUAGUGGA | 327 | UCCACUAC CUGAUGAG GCCGUUAGGC CGAA AAGCCACC | 2516 | |
| 1980 | GGCUUUGU A GUGGACAA | 328 | UUGUCCAC CUGAUGAG GCCGUUAGGC CGAA ACAAAGCC | 2517 | |
| 2006 | AAUGGCCU A CCUCCAAA | 329 | UUUGGAGG CUGAUGAG GCCGUUAGGC CGAA AGGCCAUU | 2518 | |
| 2010 | GCCUACCU C CAAAUCCC | 330 | GGGAUUUG CUGAUGAG GCCGUUAGGC CGAA AGGUAGGC | 2519 | |
| 2016 | CUCCAAAU C CCAGGCAU | 331 | AUGCCUGG CUGAUGAG GCCGUUAGGC CGAA AUUUGGAG | 2520 | |
| 2025 | CCAGGCAU U GCUAAGGU | 332 | ACCUUAGC CUGAUGAG GCCGUUAGGC CGAA AUGCCUGG | 2521 | |
| 2029 | GCAUUGCU A AGGUUGGC | 333 | GCCAACCU CUGAUGAG GCCGUUAGGC CGAA AGCAAUGC | 2522 | |
| 2034 | GCUAAGGU U GGCACUUG | 334 | CAAGUGCC CUGAUGAG GCCGUUAGGC CGAA ACCUUAGC | 2523 | |
| 2041 | UUGGCACU U GGAAAUAC | 335 | GUAUUUCC CUGAUGAG GCCGUUAGGC CGAA AGUGCCAA | 2524 | |
| 2048 | UUGGAAAU A CAGUCUGC | 336 | GCAGACUG CUGAUGAG GCCGUUAGGC CGAA AUUUCCAA | 2525 | |
| 2053 | AAUACAGU C UGCAAGCA | 337 | UGCUUGCA CUGAUGAG GCCGUUAGGC CGAA ACUGUAUU | 2526 | |
| 2066 | AGCAAGCU C ACAAACCU | 338 | AGGUUUGU CUGAUGAG GCCGUUAGGC CGAA AGCUUGCU | 2527 | |
| 2075 | ACAAACCU U GACCCUGA | 339 | UCAGGGUC CUGAUGAG GCCGUUAGGC CGAA AGGUUUGU | 2528 | |
| 2088 | CUGACUGU C ACGUCCCG | 340 | CGGGACGU CUGAUGAG GCCGUUAGGC CGAA ACAGUCAG | 2529 | |
| 2093 | UGUCACGU C CCGUGCGU | 341 | ACGCACGG CUGAUGAG GCCGUUAGGC CGAA ACGUGACA | 2530 | |
| 2102 | CCGUGCGU C CAAUGCUA | 342 | UAGCAUUG CUGAUGAG GCCGUUAGGC CGAA ACGCACGG | 2531 | |
| 2110 | CCAAUGCU A CCCUGCCU | 343 | AGGCAGGG CUGAUGAG GCCGUUAGGC CGAA AGCAUUGG | 2532 | |
| 2119 | CCCUGCCU C CAAUUACA | 344 | UGUAAUUG CUGAUGAG GCCGUUAGGC CGAA AGGCAGGG | 2533 | |
| 2124 | CCUCCAAU U ACAGUGAC | 345 | GUCACUGU CUGAUGAG GCCGUUAGGC CGAA AUUGGAGG | 2534 | |
| 2125 | CUCCAAUU A CAGUGACU | 346 | AGUCACUG CUGAUGAG GCCGUUAGGC CGAA AAUUGGAG | 2535 | |
| 2134 | CAGUGACU U CCAAAACG | 347 | CGUUUUGG CUGAUGAG GCCGUUAGGC CGAA AGUCACUG | 2536 | |
| 2135 | AGUGACUU C CAAAACGA | 348 | UCGUUUUG CUGAUGAG GCCGUUAGGC CGAA AAGUCACU | 2537 | |
| 2162 | CAGCAAAU U CCCCAGCC | 349 | GGCUGGGG CUGAUGAG GCCGUUAGGC CGAA AUUUGCUG | 2538 | |
| 2163 | AGCAAAUU C CCCAGCCC | 350 | GGGCUGGG CUGAUGAG GCCGUUAGGC CGAA AAUUUGCU | 2539 | |
| 2173 | CCAGCCCU C UGGUAGUU | 351 | AACUACCA CUGAUGAG GCCGUUAGGC CGAA AGGGCUGG | 2540 | |
| 2178 | CCUCUGGU A GUUUAUGC | 352 | GCAUAAAC CUGAUGAG GCCGUUAGGC CGAA ACCAGAGG | 2541 | |
| 2181 | CUGGUAGU U UAUGCAAA | 353 | UUUGCAUA CUGAUGAG GCCGUUAGGC CGAA ACUACCAG | 2542 | |
| 2182 | UGGUAGUU U AUGCAAAU | 354 | AUUUGCAU CUGAUGAG GCCGUUAGGC CGAA AACUACCA | 2543 | |
| 2183 | GGUAGUUU A UGCAAAUA | 355 | UAUUUGCA CUGAUGAG GCCGUUAGGC CGAA AAACUACC | 2544 | |
| 2191 | AUGCAAAU A UUCGCCAA | 356 | UUGGCGAA CUGAUGAG GCCGUUAGGC CGAA AUUUGCAU | 2545 | |
| 2193 | GCAAAUAU U CGCCAAGG | 357 | CCUUGGCG CUGAUGAG GCCGUUAGGC CGAA AUAUUUGC | 2546 | |
| 2194 | CAAAUAUU C GCCAAGGA | 358 | UCCUUGGC CUGAUGAG GCCGUUAGGC CGAA AAUAUUUG | 2547 | |
| 2207 | AGGAGCCU C CCCAAUUC | 359 | GAAUUGGG CUGAUGAG GCCGUUAGGC CGAA AGGCUCCU | 2548 | |
| 2214 | UCCCCAAU U CUCAGGGC | 360 | GCCCUGAG CUGAUGAG GCCGUUAGGC CGAA AUUGGGGA | 2549 | |
| 2215 | CCCCAAUU C UCAGGGCC | 361 | GGCCCUGA CUGAUGAG GCCGUUAGGC CGAA AAUUGGGG | 2550 | |
| 2217 | CCAAUUCU C AGGGCCAG | 362 | CUGGCCCU CUGAUGAG GCCGUUAGGC CGAA AGAAUUGG | 2551 | |
| 2229 | GCCAGUGU C ACAGCCCU | 363 | AGGGCUGU CUGAUGAG GCCGUUAGGC CGAA ACACUGGC | 2552 | |
| 2241 | GCCCUGAU U GAAUCAGU | 364 | ACUGAUUC CUGAUGAG GCCGUUAGGC CGAA AUCAGGGC | 2553 | |
| 2246 | GAUUGAAU C AGUGAAUG | 365 | CAUUCACU CUGAUGAG GCCGUUAGGC CGAA AUUCAAUC | 2554 | |
| 2265 | AAAACAGU U ACCUUGGA | 366 | UCCAAGGU CUGAUGAG GCCGUUAGGC CGAA ACUGUUUU | 2555 | |
| 2266 | AAACAGUU A CCUUGGAA | 367 | UUCCAAGG CUGAUGAG GCCGUUAGGC CGAA AACUGUUU | 2556 | |
| 2270 | AGUUACCU U GGAACUAC | 368 | GUAGUUCC CUGAUGAG GCCGUUAGGC CGAA AGGUAACU | 2557 | |
| 2277 | UUGGAACU A CUGGAUAZ | 369 | UUAUCCAG CUGAUGAG GCCGUUAGGC CGAA AGUUCCAA | 2558 | |
| 2284 | UACUGGAU A AUGGAGCA | 370 | UGCUCCAU CUGAUGAG GCCGUUAGGC CGAA AUCCAGUA | 2559 | |
| 2305 | CUGAUGCU A CUAAGGAU | 371 | AUCCUUAG CUGAUGAG GCCGUUAGGC CGAA AGCAUCAG | 2560 | |
| 2308 | AUGCUACU A AGGAUGAC | 372 | GUCAUCCU CUGAUGAG GCCGUUAGGC CGAA AGUAGCAU | 2561 | |
| 2322 | GACGGUGU C UACUCAAG | 373 | CUUGAGUA CUGAUGAG GCCGUUAGGC CGAA ACACCGUC | 2562 | |
| 2324 | CGGUGUCU A CUCAAGGU | 374 | ACCUUGAG CUGAUGAG GCCGUUAGGC CGAA AGACACCG | 2563 | |
| 2327 | UGUCUACU C AAGGUAUU | 375 | AAUACCUU CUGAUGAG GCCGUUAGGC CGAA AGUAGACA | 2564 | |
| 2333 | CUCAAGGU A UUUCACAA | 376 | UUGUGAAA CUGAUGAG GCCGUUAGGC CGAA ACCUUGAG | 2565 | |
| 2335 | CAAGGUAU U UCACAACU | 377 | AGUUGUGA CUGAUGAG GCCGUUAGGC CGAA AUACCUUG | 2566 | |
| 2336 | AAGGUAUU U CACAACUU | 378 | AAGUUGUG CUGAUGAG GCCGUUAGGC CGAA AAUACCUU | 2567 | |
| 2337 | AGGUAUUU C ACAACUUA | 379 | UAAGUUGU CUGAUGAG GCCGUUAGGC CGAA AAAUACCU | 2568 | |
| 2344 | UCACAACU U AUGACACG | 380 | CGUGUCAU CUGAUGAG GCCGUUAGGC CGAA AGUUGUGA | 2569 | |
| 2345 | CACAACUU A UGACACGA | 381 | UCGUGUCA CUGAUGAG GCCGUUAGGC CGAA AAGUUGUG | 2570 | |
| 2359 | CGAAUGGU A GAUACAGU | 382 | ACUGUAUC CUGAUGAG GCCGUUAGGC CGAA ACCAUUCG | 2571 | |
| 2363 | UGGUAGAU A CAGUGUAA | 383 | UUACACUG CUGAUGAG GCCGUUAGGC CGAA AUCUACCA | 2572 | |
| 2370 | UACAGUGU A AAAGUGCG | 384 | CGCACUUU CUGAUGAG GCCGUUAGGC CGAA ACACUGUA | 2573 | |
| 2383 | UGCGGGCU C UGGGAGGA | 385 | UCCUCCCA CUGAUGAG GCCGUUAGGC CGAA AGCCCGCA | 2574 | |
| 2394 | GGAGGAGU U AACGCAGC | 386 | GCUGCGUU CUGAUGAG GCCGUUAGGC CGAA ACUCCUCC | 2575 | |
| 2395 | GAGGAGUU A ACGCAGCC | 387 | GGCUGCGU CUGAUGAG GCCGUUAGGC CGAA AACUCCUC | 2576 | |
| 2418 | AGAGUGAU A CCCCAGCA | 388 | UGCUGGGG CUGAUGAG GCCGUUAGGC CGAA AUCACUCU | 2577 | |
| 2441 | AGCACUGU A CAUACCUG | 389 | CAGGUAUG CUGAUGAG GCCGUUAGGC CGAA ACAGUGCU | 2578 | |
| 2445 | CUGUACAU A CCUGGCUG | 390 | CAGCCAGG CUGAUGAG GCCGUUAGGC CGAA AUGUACAG | 2579 | |
| 2457 | GGCUGGAU U GAGAAUGA | 391 | UCAUUCUC CUGAUGAG GCCGUUAGGC CGAA AUCCAGCC | 2580 | |
| 2472 | GAUGAAAU A CAAUGGAA | 392 | UUCCAUUG CUGAUGAG GCCGUUAGGC CGAA AUUUCAUC | 2581 | |
| 2482 | AAUGGAAU C CACCAAGA | 393 | UCUUGGUG CUGAUGAG GCCGUUAGGC CGAA AUUCCAUU | 2582 | |
| 2499 | CCUGAAAU U AAUAAGGA | 394 | UCCUUAUU CUGAUGAG GCCGUUAGGC CGAA AUUUCAGG | 2583 | |
| 2500 | CUGAAAUU A AUAAGGAU | 395 | AUCCUUAU CUGAUGAG GCCGUUAGGC CGAA AAUUUCAG | 2584 | |
| 2503 | AAAUUAAU A AGGAUGAU | 396 | AUCAUCCU CUGAUGAG GCCGUUAGGC CGAA AUUAAUUU | 2585 | |
| 2514 | GAUGAUGU U CAACACAA | 397 | UUGUGUUG CUGAUGAG GCCGUUAGGC CGAA ACAUCAUC | 2586 | |
| 2515 | AUGAUGUU C AACACAAG | 398 | CUUGUGUU CUGAUGAG GCCGUUAGGC CGAA AACAUCAU | 2587 | |
| 2533 | AAGUGUGU U UCAGCAGA | 399 | UCUGCUGA CUGAUGAG GCCGUUAGGC CGAA ACACACUU | 2588 | |
| 2534 | AGUGUGUU U CAGCAGAA | 400 | UUCUGCUG CUGAUGAG GCCGUUAGGC CGAA AACACACU | 2589 | |
| 2535 | GUGUGUUU C AGCAGAAC | 401 | GUUCUGCU CUGAUGAG GCCGUUAGGC CGAA AAACACAC | 2590 | |
| 2546 | CAGAACAU C CUCGGGAG | 402 | CUCCCGAG CUGAUGAG GCCGUUAGGC CGAA AUGUUCUG | 2591 | |
| 2549 | AACAUCCU C GGGAGGCU | 403 | AGCCUCCC CUGAUGAG GCCGUUAGGC CGAA AGGAUGUU | 2592 | |
| 2558 | GGGAGGCU C AUUUGUGG | 404 | CCACAAAU CUGAUGAG GCCGUUAGGC CGAA AGCCUCCC | 2593 | |
| 2561 | AGGCUCAU U UGUGGCUU | 405 | AAGCCACA CUGAUGAG GCCGUUAGGC CGAA AUGAGCCU | 2594 | |
| 2562 | GGCUCAUU U GUGGCUUC | 406 | GAAGCCAC CUGAUGAG GCCGUUAGGC CGAA AAUGAGCC | 2595 | |
| 2569 | UUGUGGCU U CUGAUGUC | 407 | GACAUCAG CUGAUGAG GCCGUUAGGC CGAA AGCCACAA | 2596 | |
| 2570 | UGUGGCUU C UGAUGUCC | 408 | GGACAUCA CUGAUGAG GCCGUUAGGC CGAA AAGCCACA | 2597 | |
| 2577 | UCUGAUGU C CCAAAUGC | 409 | GCAUUUGG CUGAUGAG GCCGUUAGGC CGAA ACAUCAGA | 2598 | |
| 2587 | CAAAUGCU C CCAUACCU | 410 | AGGUAUGG CUGAUGAG GCCGUUAGGC CGAA AGCAUUUG | 2599 | |
| 2592 | GCUCCCAU A CCUGAUCU | 411 | AGAUCAGG CUGAUGAG GCCGUUAGGC CGAA AUGGGAGC | 2600 | |
| 2599 | UACCUGAU C UCUUCCCA | 412 | UGGGAAGA CUGAUGAG GCCGUUAGGC CGAA AUCAGGUA | 2601 | |
| 2601 | CCUGAUCU C UUCCCACC | 413 | GGUGGGAA CUGAUGAG GCCGUUAGGC CGAA AGAUCAGG | 2602 | |
| 2603 | UGAUCUCU U CCCACCUG | 414 | CAGGUGGG CUGAUGAG GCCGUUAGGC CGAA AGAGAUCA | 2603 | |
| 2604 | GAUCUCUU C CCACCUGG | 415 | CCAGGUGG CUGAUGAG GCCGUUAGGC CGAA AAGAGAUC | 2604 | |
| 2619 | GGCCAAAU C ACCGACCU | 416 | AGGUCGGU CUGAUGAG GCCGUUAGGC CGAA AUUUGGCC | 2605 | |
| 2640 | GCGGAAAU U CACGGGGG | 417 | CCCCCGUG CUGAUGAG GCCGUUAGGC CGAA AUUUCCGC | 2606 | |
| 2641 | CGGAAAUU C ACGGGGGC | 418 | GCCCCCGU CUGAUGAG GCCGUUAGGC CGAA AAUUUCCG | 2607 | |
| 2653 | GGGGCAGU C UCAUUAAU | 419 | AUUAAUGA CUGAUGAG GCCGUUAGGC CGAA ACUGCCCC | 2608 | |
| 2655 | GGCAGUCU C AUUAAUCU | 420 | AGAUUAAU CUGAUGAG GCCGUUAGGC CGAA AGACUGCC | 2609 | |
| 2658 | AGUCUCAU U AAUCUGAC | 421 | GUCAGAUU CUGAUGAG GCCGUUAGGC CGAA AUGAGACU | 2610 | |
| 2659 | GUCUCAUU A AUCUGACU | 422 | AGUCAGAU CUGAUGAG GCCGUUAGGC CGAA AAUGAGAC | 2611 | |
| 2662 | UCAUUAAU C UGACUUGG | 423 | CCAAGUCA CUGAUGAG GCCGUUAGGC CGAA AUUAAUGA | 2612 | |
| 2668 | AUCUGACU U GGACAGCU | 424 | AGCUGUCC CUGAUGAG GCCGUUAGGC CGAA AGUCAGAU | 2613 | |
| 2677 | GGACAGCU C CUGGGGAU | 425 | AUCCCCAG CUGAUGAG GCCGUUAGGC CGAA AGCUGUCC | 2614 | |
| 2689 | GGGAUGAU U AUGACCAU | 426 | AUGGUCAU CUGAUGAG GCCGUUAGGC CGAA AUCAUCCC | 2615 | |
| 2690 | GGAUGAUU A UGACCAUG | 427 | CAUGGUCA CUGAUGAG GCCGUUAGGC CGAA AAUCAUCC | 2616 | |
| 2707 | GAACAGCU C ACAAGUAU | 428 | AUACUUGU CUGAUGAG GCCGUUAGGC CGAA AGCUGUUC | 2617 | |
| 2714 | UCACAAGU A UAUCAUUC | 429 | GAAUGAUA CUGAUGAG GCCGUUAGGC CGAA ACUUGUGA | 2618 | |
| 2716 | ACAAGUAU A UCAUUCGA | 430 | UCGAAUGA CUGAUGAG GCCGUUAGGC CGAA AUACUUGU | 2619 | |
| 2718 | AAGUAUAU C AUUCGAAU | 431 | AUUCGAAU CUGAUGAG GCCGUUAGGC CGAA AUAUACUU | 2620 | |
| 2721 | UAUAUCAU U CGAAUAAG | 432 | CUUAUUCG CUGAUGAG GCCGUUAGGC CGAA AUGAUAUA | 2621 | |
| 2722 | AUAUCAUU C GAAUAAGU | 433 | ACUUAUUC CUGAUGAG GCCGUUAGGC CGAA AAUGAUAU | 2622 | |
| 2727 | AUUCGAAU A AGUACAAG | 434 | CUUGUACU CUGAUGAG GCCGUUAGGC CGAA AUUCGAAU | 2623 | |
| 2731 | GAAUAAGU A CAAGUAUU | 435 | AAUACUUG CUGAUGAG GCCGUUAGGC CGAA ACUUAUUC | 2624 | |
| 2737 | GUACAAGU A UUCUUGAU | 436 | AUCAAGAA CUGAUGAG GCCGUUAGGC CGAA ACUUGUAC | 2625 | |
| 2739 | ACAAGUAU U CUUGAUCU | 437 | AGAUCAAG CUGAUGAG GCCGUUAGGC CGAA AUACUUGU | 2626 | |
| 2740 | CAAGUAUU C UUGAUCUC | 438 | GAGAUCAA CUGAUGAG GCCGUUAGGC CGAA AAUACUUG | 2627 | |
| 2742 | AGUAUUCU U GAUCUCAG | 439 | CUGAGAUC CUGAUGAG GCCGUUAGGC CGAA AGAAUACU | 2628 | |
| 2746 | UUCUUGAU C UCAGAGAC | 440 | GUCUCUGA CUGAUGAG GCCGUUAGGC CGAA AUCAAGAA | 2629 | |
| 2748 | CUUGAUCU C AGAGACAA | 441 | UUGUCUCU CUGAUGAG GCCGUUAGGC CGAA AGAUCAAG | 2630 | |
| 2759 | AGACAAGU U CAAUGAAU | 442 | AUUCAUUG CUGAUGAG GCCGUUAGGC CGAA ACUUGUCU | 2631 | |
| 2760 | GACAAGUU C AAUGAAUC | 443 | GAUUCAUU CUGAUGAG GCCGUUAGGC CGAA AACUUGUC | 2632 | |
| 2768 | CAAUGAAU C UCUUCAAG | 444 | CUUGAAGA CUGAUGAG GCCGUUAGGC CGAA AUUCAUUG | 2633 | |
| 2770 | AUGAAUCU C UUCAAGUG | 445 | CACUUGAA CUGAUGAG GCCGUUAGGC CGAA AGAUUCAU | 2634 | |
| 2772 | GAAUCUCU U CAAGUGAA | 446 | UUCACUUG CUGAUGAG GCCGUUAGGC CGAA AGAGAUUC | 2635 | |
| 2773 | AAUCUCUU C AAGUGAAU | 447 | AUUCACUU CUGAUGAG GCCGUUAGGC CGAA AAGAGAUU | 2636 | |
| 2782 | AAGUGAAU A CUACUGCU | 448 | AGCAGUAG CUGAUGAG GCCGUUAGGC CGAA AUUCACUU | 2637 | |
| 2785 | UGAAUACU A CUGCUCUC | 449 | GAGAGCAG CUGAUGAG GCCGUUAGGC CGAA AGUAUUCA | 2638 | |
| 2791 | CUACUGCU C UCAUCCCA | 450 | UGGGAUGA CUGAUGAG GCCGUUAGGC CGAA AGCAGUAG | 2639 | |
| 2793 | ACUGCUCU C AUCCCAAA | 451 | UUUGGGAU CUGAUGAG GCCGUUAGGC CGAA AGAGCAGU | 2640 | |
| 2796 | GCUCUCAU C CCAAAGGA | 452 | UCCUUUGG CUGAUGAG GCCGUUAGGC CGAA AUGAGAGC | 2641 | |
| 2813 | AGCCAACU C UGAGGAAG | 453 | CUUCCUCA CUGAUGAG GCCGUUAGGC CGAA AGUUGGCU | 2642 | |
| 2823 | GAGGAAGU C UUUUUGUU | 454 | AACAAAAA CUGAUGAG GCCGUUAGGC CGAA ACUUCCUC | 2643 | |
| 2825 | GGAAGUCU U UUUGUUUA | 455 | UAAACAAA CUGAUGAG GCCGUUAGGC CGAA AGACUUCC | 2644 | |
| 2826 | GAAGUCUU U UUGUUUAA | 456 | UUAAACAA CUGAUGAG GCCGUUAGGC CGAA AAGACUUC | 2645 | |
| 2827 | AAGUCUUU U UGUUUAAA | 457 | UUUAAACA CUGAUGAG GCCGUUAGGC CGAA AAAGACUU | 2646 | |
| 2828 | AGUCUUUU U GUUUAAAC | 458 | GUUUAAAC CUGAUGAG GCCGUUAGGC CGAA AAAAGACU | 2647 | |
| 2831 | CUUUUUGU U UAAACCAG | 459 | CUGGUUUA CUGAUGAG GCCGUUAGGC CGAA ACAAAAAG | 2648 | |
| 2832 | UUUUUGUU U AAACCAGA | 460 | UCUGGUUU CUGAUGAG GCCGUUAGGC CGAA AACAAAAA | 2649 | |
| 2833 | UUUUGUUU A AACCAGAA | 461 | UUCUGGUU CUGAUGAG GCCGUUAGGC CGAA AAACAAAA | 2650 | |
| 2847 | GAAAACAU U ACUUUUGA | 462 | UCAAAAGU CUGAUGAG GCCGUUAGGC CGAA AUGUUUUC | 2651 | |
| 2848 | AAAACAUU A CUUUUGAA | 463 | UUCAAAAG CUGAUGAG GCCGUUAGGC CGAA AAUGUUUU | 2652 | |
| 2851 | ACAUUACU U UUGAAAAU | 464 | AUUUUCAA CUGAUGAG GCCGUUAGGC CGAA AGUAAUGU | 2653 | |
| 2852 | CAUUACUU U UGAAAAUG | 465 | CAUUUUCA CUGAUGAG GCCGUUAGGC CGAA AAGUAAUG | 2654 | |
| 2853 | AUUACUUU U GAAAAUGG | 466 | CCAUUUUC CUGAUGAG GCCGUUAGGC CGAA AAAGUAAU | 2655 | |
| 2869 | GCACAGAU C UUUUCAUU | 467 | AAUGAAAA CUGAUGAG GCCGUUAGGC CGAA AUCUGUGC | 2656 | |
| 2871 | ACAGAUCU U UUCAUUGC | 468 | GCAAUGAA CUGAUGAG GCCGUUAGGC CGAA AGAUCUGU | 2657 | |
| 2872 | CAGAUCUU U UCAUUGCU | 469 | AGCAAUGA CUGAUGAG GCCGUUAGGC CGAA AAGAUCUG | 2658 | |
| 2873 | AGAUCUUU U CAUUGCUA | 470 | UAGCAAUG CUGAUGAG GCCGUUAGGC CGAA AAAGAUCU | 2659 | |
| 2874 | GAUCUUUU C AUUGCUAU | 471 | AUAGCAAU CUGAUGAG GCCGUUAGGC CGAA AAAAGAUC | 2660 | |
| 2877 | CUUUUCAU U GCUAUUCA | 472 | UGAAUAGC CUGAUGAG GCCGUUAGGC CGAA AUGAAAAG | 2661 | |
| 2881 | UCAUUGCU A UUCAGGCU | 473 | AGCCUGAA CUGAUGAG GCCGUUAGGC CGAA AGCAAUGA | 2662 | |
| 2883 | AUUGCUAU U CAGGCUGU | 474 | ACAGCCUG CUGAUGAG GCCGUUAGGC CGAA AUAGCAAU | 2663 | |
| 2884 | UUGCUAUU C AGGCUGUU | 475 | AACAGCCU CUGAUGAG GCCGUUAGGC CGAA AAUAGCAA | 2664 | |
| 2892 | CAGGCUGU U GAUAAGGU | 476 | ACCUUAUC CUGAUGAG GCCGUUAGGC CGAA ACAGCCUG | 2665 | |
| 2896 | CUGUUGAU A AGGUCGAU | 477 | AUCGACCU CUGAUGAG GCCGUUAGGC CGAA AUCAACAG | 2666 | |
| 2901 | GAUAAGGU C GAUCUGAA | 478 | UUCAGAUC CUGAUGAG GCCGUUAGGC CGAA ACCUUAUC | 2667 | |
| 2905 | AGGUCGAU C UGAAAUCA | 479 | UGAUUUCA CUGAUGAG GCCGUUAGGC CGAA AUCGACCU | 2668 | |
| 2912 | UCUGAAAU C AGAAAUAU | 480 | AUAUUUCU CUGAUGAG GCCGUUAGGC CGAA AUUUCAGA | 2669 | |
| 2919 | UCAGAAAU A UCCAACAU | 481 | AUGUUGGA CUGAUGAG GCCGUUAGGC CGAA AUUUCUGA | 2670 | |
| 2921 | AGAAAUAU C CAACAUUG | 482 | CAAUGUUG CUGAUGAG GCCGUUAGGC CGAA AUAUUUCU | 2671 | |
| 2928 | UCCAACAU U GCACGAGU | 483 | ACUCGUGC CUGAUGAG GCCGUUAGGC CGAA AUGUUGGA | 2672 | |
| 2937 | GCACGAGU A UCUUUGUU | 484 | AACAAAGA CUGAUGAG GCCGUUAGGC CGAA ACUCGUGC | 2673 | |
| 2939 | ACGAGUAU C UUUGUUUA | 485 | UAAACAAA CUGAUGAG GCCGUUAGGC CGAA AUACUCGU | 2674 | |
| 2941 | GAGUAUCU U UGUUUAUU | 486 | AAUAAACA CUGAUGAG GCCGUUAGGC CGAA AGAUACUC | 2675 | |
| 2942 | AGUAUCUU U GUUUAUUC | 487 | GAAUAAAC CUGAUGAG GCCGUUAGGC CGAA AAGAUACU | 2676 | |
| 2945 | AUCUUUGU U UAUUCCUC | 488 | GAGGAAUA CUGAUGAG GCCGUUAGGC CGAA ACAAAGAU | 2677 | |
| 2946 | UCUUUGUU U AUUCCUCC | 489 | GGAGGAAU CUGAUGAG GCCGUUAGGC CGAA AACAAAGA | 2678 | |
| 2947 | CUUUGUUU A UUCCUCCA | 490 | UGGAGGAA CUGAUGAG GCCGUUAGGC CGAA AAACAAAG | 2679 | |
| 2949 | UUGUUUAU U CCUCCACA | 491 | UGUGGAGG CUGAUGAG GCCGUUAGGC CGAA AUAAACAA | 2680 | |
| 2950 | UGUUUAUU C CUCCACAG | 492 | CUGUGGAG CUGAUGAG GCCGUUAGGC CGAA AAUAAACA | 2681 | |
| 2953 | UUAUUCCU C CACAGACU | 493 | AGUCUGUG CUGAUGAG GCCGUUAGGC CGAA AGGAAUAA | 2682 | |
| 2962 | CACAGACU C CGCCAGAG | 494 | CUCUGGCG CUGAUGAG GCCGUUAGGC CGAA AGUCUGUG | 2683 | |
| 2977 | AGACACCU A GUCCUGAU | 495 | AUCAGGAC CUGAUGAG GCCGUUAGGC CGAA AGGUGUCU | 2684 | |
| 2980 | CACCUAGU C CUGAUGAA | 496 | UUCAUCAG CUGAUGAG GCCGUUAGGC CGAA ACUAGGUG | 2685 | |
| 2993 | UGAAACGU C UGCUCCUU | 497 | AAGGAGCA CUGAUGAG GCCGUUAGGC CGAA ACGUUUCA | 2686 | |
| 2998 | CGUCUGCU C CUUGUCCU | 498 | AGGACAAG CUGAUGAG GCCGUUAGGC CGAA AGCAGACG | 2687 | |
| 3001 | CUGCUCCU U GUCCUAAU | 499 | AUUAGGAC CUGAUGAG GCCGUUAGGC CGAA ACAAGGAG | 2688 | |
| 3004 | CUCCUUGU C CUAAUAUU | 500 | AAUAUUAG CUGAUGAG GCCGUUAGGC CGAA ACAAGGAG | 2689 | 2689 |
| 3007 | CUUGUCCU A AUAUUCAU | 501 | AUGAAUAU CUGAUGAG GCCGUUAGGC CGAA AGGACAAG | 2690 | |
| 3010 | GUCCUAAU A UUCAUAUC | 502 | GAUAUGAA CUGAUGAG GCCGUUAGGC CGAA AUUAGGAC | 2691 | |
| 3012 | CCUAAUAU U CAUAUCAA | 503 | UUGAUAUG CUGAUGAG GCCGUUAGGC CGAA AUAUUAGG | 2692 | |
| 3013 | CUAAUAUU C AUAUCAAC | 504 | GUUGAUAU CUGAUGAG GCCGUUAGGC CGAA AZUAUUAG | 2693 | |
| 3016 | AUAUUCAU A UCAACAGC | 505 | GCUGUUGA CUGAUGAG GCCGUUAGGC CGAA AUGAAUAU | 2694 | |
| 3018 | AUUCAUAU C AACAGCAC | 506 | GUGCUGUU CUGAUGAG GCCGUUAGGC CGAA AUAUGAAU | 2695 | |
| 3030 | AGCACCAU U CCUGGCAU | 507 | AUGCCAGG CUGAUGAG GCCGUUAGGC CGAA AUGGUGCU | 2696 | |
| 3031 | GCACCAUU C CUGGCAUU | 508 | AAUGCCAG CUGAUGAG GCCGUUAGGC CGAA AAUGGUGC | 2697 | |
| 3039 | CCUGGCAU U CACAUUUU | 509 | AAAAUGUG CUGAUGAG GCCGUUAGGC CGAA AUGCCAGG | 2698 | |
| 3040 | CUGGCAUU C ACAUUUUA | 510 | UAAAAUGU CUGAUGAG GCCGUUAGGC CGAA AAUGCCAG | 2699 | |
| 3045 | AUUCACAU U UUAAAAAU | 511 | AUUUUUAA CUGAUGAG GCCGUUAGGC CGAA AUGUGAAU | 2700 | |
| 3046 | UUCACAUU U UAAAAAUU | 512 | AAUUUUUA CUGAUGAG GCCGUUAGGC CGAA AAUGUGAA | 2701 | |
| 3047 | UCACAUUU U AAAAAUUA | 513 | UAAUUUUU CUGAUGAG GCCGUUAGGC CGAA AAAUGUGA | 2702 | |
| 3048 | CACAUUUU A AAAAUUAU | 514 | AUAAUUUU CUGAUGAG GCCGUUAGGC CGAA AAAAUGUG | 2703 | |
| 3054 | UUAAAAAU U AUGUGGAA | 515 | UUCCACAU CUGAUGAG GCCGUUAGGC CGAA AUUUUUAA | 2704 | |
| 3055 | UAAAAAUU A UGUGGAAG | 516 | CUUCCACA CUGAUGAG GCCGUUAGGC CGAA AAUUUUUA | 2705 | |
| 3069 | AAGUGGAU A GGAGAACU | 517 | AGUUCUCC CUGAUGAG GCCGUUAGGC CGAA AUCCACUU | 2706 | |
| 3086 | GCAGCUGU C AAUAGCCU | 518 | AGGCUAUU CUGAUGAG GCCGUUAGGC CGAA ACAGCUGC | 2707 | |
| 3090 | CUGUCAAU A GCCUAGGG | 519 | CCCUAGGC CUGAUGAG GCCGUUAGGC CGAA AUUGACAG | 2708 | |
| 3095 | AAUAGCCU A CGGCUGAA | 520 | UUCAGCCC CUGAUCAG GCCGUUAGGC CGAA AGGCUAUU | 2709 | |
| 3105 | GGCUGAAU U UUUGUCAG | 521 | CUGACAAA CUGAUGAG GCCGUUAGGC CGAA AUUCAGCC | 2710 | |
| 3106 | GCUGAAUU U UUGUCAGA | 522 | UCUGACAA CUGAUGAG GCCGUUAGGC CGAA AAUUCAGC | 2711 | |
| 3107 | CUGAAUUU U UGUCAGAU | 523 | AUCUGACA CUGAUGAG GCCGUUAGGC CGAA AAAUUCAG | 2712 | |
| 3108 | UGAAUUUU U GUCAGAUA | 524 | UAUCUGAC CUGAUGAG GCCGUUAGGC CGAA AAAAUUCA | 2713 | |
| 3111 | AUUUUUGU C AGAUAAAU | 525 | AUUUAUCU CUGAUGAG GCCGUUAGGC CGAA ACAAAAAU | 2714 | |
| 3116 | UGUCAGAU A AAUAAAAU | 526 | AUUUUAUU CUGAUGAG GCCGUUAGGC CGAA AUCUGACA | 2715 | |
| 3120 | AGAUAAAU A AAAUAAAU | 527 | AUUUAUUU CUGAUGAG GCCGUUAGGC CGAA AUUUAUCU | 2716 | |
| 3125 | AAUAAAAU A AAUCAUUC | 528 | GAAUGAUU CUGAUGAG GCCGUUAGGC CGAA AUUUUAUU | 2717 | |
| 3129 | AAAUAAAU C AUUCAUCC | 529 | GGAUGAAU CUGAUGAG GCCGUUAGGC CGAA AUUUAUUU | 2718 | |
| 3132 | UAAAUCAU U CAUCCUUU | 530 | AAAGGAUG CUGAUGAG GCCGUUAGGC CGAA AUGAUUUA | 2719 | |
| 3133 | AAAUCAUU C AUCCUUUU | 531 | AAAAGGAU CUGAUGAG GCCGUUAGGC CGAA AAUGAUUU | 2720 | |
| 3136 | UCAUUCAU C CUUUUUUU | 532 | AAAAAAAG CUGAUGAG GCCGUUAGGC CGAA AUGAAUGA | 2721 | |
| 3139 | UUCAUCCU U UUUUUGAU | 533 | AUCAAAAA CUGAUGAG GCCGUUAGGC CGAA AGGAUGAA | 2722 | |
| 3140 | UCAUCCUU U UUUUGAUU | 534 | AAUCAAAA CUGAUGAG GCCGUUAGGC CGAA AAGGAUGA | 2723 | |
| 3141 | CAUCCUUU U UUUGAUUA | 535 | UAAUCAAA CUGAUGAG GCCGUUAGGC CGAA AAAGGAUG | 2724 | |
| 3142 | AUCCUUUU U UUGAUUAU | 536 | AUAAUCAA CUGAUGAG GCCGUUAGGC CGAA AAAAGGAU | 2725 | |
| 3143 | UCCUUUUU U UGAUUAUA | 537 | UAUAAUCA CUGAUGAG GCCGUUAGGC CGAA AAAAAGGA | 2726 | |
| 3144 | CCUUUUUU U GAUUAUAA | 538 | UUAUAAUC CUGAUGAG GCCGUUAGGC CGAA AAAAAAGG | 2727 | |
| 3148 | UUUUUGAU U AUAAAAUU | 539 | AAUUUUAU CUGAUGAG GCCGUUAGGC CGAA AUCAAAAA | 2728 | |
| 3149 | UUUUGAUU A UAAAAUUU | 540 | AAAUUUUA CUGAUGAG GCCGUUAGGC CGAA AAUCAAAA | 2729 | |
| 3151 | UUGAUUAU A AAAUUUUC | 541 | GAAAAUUU CUGAUGAG GCCGUUAGGC CGAA AUAAUCAA | 2730 | |
| 3156 | UAUAAAAU U UUCUAAAA | 542 | UUUUAGAA CUGAUGAG GCCGUUAGGC CGAA AUUUUAUA | 2731 | |
| 3157 | AUAAAAUU U UCUAAAAU | 543 | AUUUUAGA CUGAUGAG GCCGUUAGGC CGAA AAUUUUAU | 2732 | |
| 3158 | UAAAAUUU U CUAAAAUG | 544 | CAUUUUAG CUGAUGAG GCCGUUAGGC CGAA AAAUUUUA | 2733 | |
| 3159 | AAAAUUUU C UAAAAUGU | 545 | ACAUUUUA CUGAUGAG GCCGUUAGGC CGAA AAAAUUUU | 2734 | |
| 3161 | AAUUUUCU A AAAUGUAU | 546 | AUACAUUU CUGAUGAG GCCGUUAGGC CGAA AGAAAAUU | 2735 | |
| 3168 | UAAAAUGU A UUUUAGAC | 547 | GUCUAAAA CUGAUGAG GCCGUUAGGC CGAA ACAUUUUA | 2736 | |
| 3170 | AAAUGUAU U UUAGACUU | 548 | AAGUCUAA CUGAUGAG GCCGUUAGGC CGAA AUACAUUU | 2737 | |
| 3260 | AAAUGUAU U UUAGACUU | 548 | AAGUCUAA CUGAUGAG GCCGUUAGGC CGAA AUACAUUU | 2737 | |
| 3171 | AAUGUAUU U UAGACUUC | 549 | GAAGUCUA CUGAUGAG GCCGUUAGGC CGAA AAUACAUU | 2738 | |
| 3261 | AAUGUAUU U UAGACUUC | 549 | GAAGUCUA CUGAUGAG GCCGUUAGGC CGAA AAUACAUU | 2738 | |
| 3172 | AUGUAUUU U AGACUUCC | 550 | GGAAGUCU CUGAUGAG GCCGUUAGGC CGAA AAAUACAU | 2739 | |
| 3262 | AUGUAUUU U AGACUUCC | 550 | GGAAGUCU CUGAUGAG GCCGUUAGGC CGAA AAAUACAU | 2739 | |
| 3173 | UGUAUUUU A GACUUCCU | 551 | AGGAAGUC CUGAUGAG GCCGUUAGGC CGAA AAAAUACA | 2740 | |
| 3263 | UGUAUUUU A GACUUCCU | 551 | AGGAAGUC CUGAUGAG GCCGUUAGGC CGAA AAAAUACA | 2740 | |
| 3178 | UUUAGACU U CCUGUAGG | 552 | CCUACAGG CUGAUGAG GCCGUUAGGC CGAA AGUCUAAA | 2741 | |
| 3268 | UUUAGACU U CCUGUAGG | 552 | CCUACAGG CUGAUGAG GCCGUUAGGC CGAA AGUCUAAA | 2741 | |
| 3179 | UUAGACUU C CUGUAGGG | 553 | CCCUACAG CUGAUGAG GCCGUUAGGC CGAA AAGUCUAA | 2742 | |
| 3269 | UUAGACUU C CUGUAGGG | 553 | CCCUACAG CUGAUGAG GCCGUUAGGC CGAA AAGUCUAA | 2742 | |
| 3184 | CUUCCUGU A GGGGGCGA | 554 | UCGCCCCC CUGAUGAG GCCGUUAGGC CGAA ACAGGAAG | 2743 | |
| 3274 | CUUCCUGU A GGGGGCGA | 554 | UCGCCCCC CUGAUGAG GCCGUUAGGC CGAA ACAGGAAG | 2743 | |
| 3194 | GGGGCGAU A UACUAAAU | 555 | AUUUAGUA CUGAUGAG GCCGUUAGGC CGAA AUCGCCCC | 2744 | |
| 3247 | GGGGCGAU A UACUAAAU | 555 | AUUUAGUA CUGAUGAG GCCGUUAGGC CGAA AUCGCCCC | 2744 | |
| 3196 | GGCGAUAU A CUAAAUGU | 556 | ACAUUUAG CUGAUGAG GCCGUUAGGC CGAA AUAUCGCC | 2745 | |
| 3249 | GGCGAUAU A CUAAAUGU | 556 | ACAUUUAG CUGAUGAG GCCGUUAGGC CGAA AUAUCGCC | 2745 | |
| 3199 | GAUAUACU A AAUGUAUA | 557 | UAUACAUU CUGAUGAG GCCGUUAGGC CGAA AGUAUAUC | 2746 | |
| 3205 | CUAAAUGU A UAUAGUAC | 558 | GUACUAUA CUGAUGAG GCCGUUAGGC CGAA ACAUUUAG | 2747 | |
| 3207 | AAAUGUAU A UAGUACAU | 559 | AUGUACUA CUGAUGAG GCCGUUAGGC CGAA AUACAUUU | 2748 | |
| 3209 | AUGUAUAU A GUACAUUU | 560 | AAAUGUAC CUGAUGAG GCCGUUAGGC CGAA AUAUACAU | 2749 | |
| 3212 | UAUAUAGU A CAUUUAUA | 561 | UAUAAAUG CUGAUGAG GCCGUUAGGC CGAA ACUAUAUA | 2750 | |
| 3216 | UAGUACAU U UAUACUAA | 562 | UUAGUAUA CUGAUGAG GCCGUUAGGC CGAA AUGUACUA | 2751 | |
| 3217 | AGUACAUU U AUACUAAA | 563 | UUUAGUAU CUGAUGAG GCCGUUAGGC CGAA AAUGUACU | 2752 | |
| 3218 | GUACAUUU A UACUAAAU | 564 | AUUUAGUA CUGAUGAG GCCGUUAGGC CGAA AAAUGUAC | 2753 | |
| 3220 | ACAUUUAU A CUAAAUGU | 565 | ACAUUUAG CUGAUGAG GCCGUUAGGC CGAA AUAAAUGU | 2754 | |
| 3223 | UUUAUACU A AAUGUAUU | 566 | AAUACAUU CUGAUGAG GCCGUUAGGC CGAA AGUAUAAA | 2755 | |
| 3229 | CUAAAUGU A UUCCUGUA | 567 | UACAGGAA CUGAUGAG GCCGUUAGGC CGAA ACAUUUAG | 2756 | |
| 3231 | AAAUGUAU U CCUGUAGG | 568 | CCUACAGG CUGAUGAG GCCGUUAGGC CGAA AUACAUUU | 2757 | |
| 3232 | AAUGUAUU C CUGUAGGG | 569 | CCCUACAG CUGAUGAG GCCGUUAGGC CGAA AAUACAUU | 2758 | |
| 3237 | AUUCCUGU A GGGGGCGA | 570 | UCGCCCCC CUGAUGAG GCCGUUAGGC CGAA ACAGGAAU | 2759 | |
| 3252 | GAUAUACU A AAUGUAUU | 571 | AAUACAUU CUGAUGAG GCCGUUAGGC CGAA AGUAUAUC | 2760 | |
| 3258 | CUAAAUGU A UUUUAGAC | 572 | GUCUAAAA CUGAUGAG GCCGUUAGGC CGAA ACAUUUAG | 2761 | |
| 3284 | GGGGCGAU A AAAUAAAA | 573 | UUUUAUUU CUGAUGAG GCCGUUAGGC CGAA AUCGCCCC | 2762 | |
| 3289 | GAUAAAAU A AAAUGCUA | 574 | UAGCAUUU CUGAUGAG GCCGUUAGGC CGAA AUUUUAUC | 2763 | |
| 3297 | AAAAUGCU A AACAACUG | 575 | CAGUUGUU CUGAUGAG GCCGUUAGGC CGAA AGCAUUUU | 2764 | |

Input Sequence = NM_001285. Cut Site = UH/.
Arm Length = 8. Core Sequence = CUGAUGAG GCCGUUAGGC CGAA
Underlined region can be any X sequence or linker, as described herein.
NM_001285 (Homo sapiens chloride channel, calcium activated, 1 (CLCA1) mRNA, 3311 bp)

[0191] TABLE IV
Human CLCA1 Inozyme and Target Sequence 249.021

| | | | | Rz |
|---|---|---|---|---|
| | | Seq ID | | Seq ID |
| Pos | Substrate | No. | Inozyme | No. |
| 10 | GCUAAUGC U UUUGGUAC | 576 | GUACCAAA CUGAUGAG GCCGUUAGGC CGAA ICAUUAGC | 2765 |
| 19 | UUUGGUAC A AAUGGAUG | 577 | CAUCCAUU CUGAUGAG GCCGUUAGGC CGAA IUACCAAA | 2766 |
| 50 | AUAUUUUC U UGUUUAAG | 578 | CUUAAACA CUGAUGAG GCCGUUAGGC CGAA IAAAAUAU | 2767 |
| 65 | AGGGGAGC A UGAAGAGG | 579 | CCUCUUCA CUGAUGAG GCCGUUAGGC CGAA ICUCCCCU | 2768 |
| 89 | GUUAUGUC A AGCAUCUG | 580 | CAGAUGCU CUGAUGAG GCCGUUAGGC CGAA IACAUAAC | 2769 |
| 93 | UGUCAAGC A UCUGGCAC | 581 | GUGCCAGA CUGAUGAG GCCGUUAGGC CGAA ICUUGACA | 2770 |
| 96 | CAAGCAUC U GGCACAGC | 582 | GCUGUGCC CUGAUGAG GCCGUUAGGC CGAA IAUGCUUG | 2771 |
| 100 | CAUCUGGC A CAGCUGAA | 583 | UUCAGCUG CUGAUGAG GCCGUUAGGC CGAA ICCAGAUG | 2772 |
| 102 | UCUGGCAC A GCUGAAGG | 584 | CCUUCAGC CUGAUGAG GCCGUUAGGC CGAA IUGCCAGA | 2773 |
| 105 | GGCACAGC U GAAGGCAG | 585 | CUGCCUUC CUGAUGAG GCCGUUAGGC CGAA ICUGUGCC | 2774 |
| 112 | CUGAAGGC A GAUGGAAA | 586 | UUUCCAUC CUGAUGAG GCCGUUAGGC CGAA ICCUUCAG | 2775 |
| 128 | AUAUUUAC A AGUACGCA | 587 | UGCGUACU CUGAUGAG GCCGUUAGGC CGAA IUAAAUAU | 2776 |
| 136 | AAGUACGC A AUUUGAGA | 588 | UCUCAAAU CUGAUGAG GCCGUUAGGC CGAA ICGUACUU | 2777 |
| 146 | UUUGAGAC U AAGAUAUU | 589 | AAUAUCUU CUGAUGAG GCCGUUAGGC CGAA IUCUCAAA | 2778 |
| 161 | UUGUUAUC A UUCUCCUA | 590 | UAGGAGAA CUGAUGAG GCCGUUAGGC CGAA IAUAACAA | 2779 |
| 165 | UAUCAUUC U CCUAUUGA | 591 | UCAAUAGG CUGAUGAG GCCGUUAGGC CGAA IAAUGAUA | 2780 |
| 167 | UCAUUCUC C UAUUGAAG | 592 | CUUCAAUA CUGAUGAG GCCGUUAGGC CGAA IAGAAUGA | 2781 |
| 168 | CAUUCUCC U AUUGAAGA | 593 | UCUUCAAU CUGAUGAG GCCGUUAGGC CGAA IGAGAAUG | 2782 |
| 178 | UUGAAGAC A AGAGCAAU | 594 | AUUGCUCU CUGAUGAG GCCGUUAGGC CGAA IUCUUCAA | 2783 |
| 184 | ACAAGAGC A AUAGUAAA | 595 | UUUACUAU CUGAUGAG GCCGUUAGGC CGAA ICUCUUGU | 2784 |
| 195 | AGUAAAAC A CAUCAGGU | 596 | ACCUGAUG CUGAUGAG GCCGUUAGGC CGAA IUUUUACU | 2785 |
| 197 | UAAAACAC A UCAGGUCA | 597 | UGACCUGA CUGAUGAG GCCGUUAGGC CGAA IUGUUUUA | 2786 |
| 200 | AACACAUC A GGUCAGGG | 598 | CCCUGACC CUGAUGAG GCCGUUAGGC CGAA IAUGUGUU | 2787 |
| 205 | AUCAGGUC A GGGGGUUA | 599 | UAACCCCC CUGAUGAG GCCGUUAGGC CGAA IACCUGAU | 2788 |
| 219 | UUAAAGAC C UGUGAUAA | 600 | UUAUCACA CUGAUGAG GCCGUUAGGC CGAA IUCUUUAA | 2789 |
| 220 | UAAAGACC U GUGAUAAA | 601 | UUUAUCAC CUGAUGAG GCCGUUAGGC CGAA IGUCUUUA | 2790 |
| 230 | UGAUAAAC C ACUUCCGA | 602 | UCGGAAGU CUGAUGAG GCCGUUAGGC CGAA IUUUAUCA | 2791 |
| 231 | GAUAAACC A CUUCCGAU | 603 | AUCGGAAG CUGAUGAG GCCGUUAGGC CGAA IGUUUAUC | 2792 |
| 233 | UAAACCAC U UCCGAUAA | 604 | UUAUCGGA CUGAUGAG GCCGUUAGGC CGAA IUGGUUUA | 2793 |
| 236 | ACCACUUC C GAUAAGUU | 605 | AACUUAUC CUGAUGAG GCCGUUAGGC CGAA IAAGUGGU | 2794 |
| 258 | CGUGUGUC U AUAUUUUC | 606 | GAAAAUAU CUGAUGAG GCCGUUAGGC CGAA IACACACG | 2795 |
| 267 | AUAUUUUC A UAUCUGUA | 607 | UACAGAUA CUGAUGAG GCCGUUAGGC CGAA IAAAAUAU | 2796 |
| 272 | UUCAUAUC U GUAUAUAU | 608 | AUAUAUAC CUGAUGAG GCCGUUAGGC CGAA IAUAUGAA | 2797 |
| 299 | AGAAAGAC A CCUUCGUA | 609 | UACGAAGG CUGAUGAG GCCGUUAGGC CGAA IUCUUUCU | 2798 |
| 301 | AAAGACAC C UUCGUAAC | 610 | GUUACGAA CUGAUGAG GCCGUUAGGC CGAA IUGUCUUU | 2799 |
| 302 | AAGACACC U UCGUAACC | 611 | GGUUACGA CUGAUGAG GCCGUUAGGC CGAA IGUGUCUU | 2800 |
| 310 | UUCGUAAC C CGCAUUUU | 612 | AAAAUGCG CUGAUGAG GCCGUUAGGC CGAA IUUACGAA | 2801 |
| 311 | UCGUAACC C GCAUUUUC | 613 | GAAAAUGC CUGAUGAG GCCGUUAGGC CGAA IGUUACGA | 2802 |
| 314 | UAACCCGC A UUUUCCAA | 614 | UUGGAAAA CUGAUGAG GCCGUUAGGC CGAA ICGGGUUA | 2803 |
| 320 | GCAUUUUC C AAAGAGAG | 615 | CUCUCUUU CUGAUGAG GCCGUUAGGC CGAA IAAAAUGC | 2804 |
| 321 | CAUUUUCC A AAGAGAGG | 616 | CCUCUCUU CUGAUGAG GCCGUUAGGC CGAA IGAAAAUG | 2805 |
| 334 | GAGGAAUC A CAGGGAGA | 617 | UCUCCCUG CUGAUGAG GCCGUUAGGC CGAA IAUUCCUC | 2806 |
| 336 | GGAAUCAC A GGGAGAUG | 618 | CAUCUCCC CUGAUGAG GCCGUUAGGC CGAA IUGAUUCC | 2807 |
| 348 | AGAUGUAC A GCAAUGGG | 619 | CCCAUUGC CUGAUGAG GCCGUUAGGC CGAA IUACAUCU | 2808 |
| 351 | UGUACAGC A AUGGGGCC | 620 | GGCCCCAU CUGAUGAG GCCGUUAGGC CGAA ICUGUACA | 2809 |
| 359 | AAUGGGGC C AUUUAAGA | 621 | UCUUAAAU CUGAUGAG GCCGUUAGGC CGAA ICCCCAUU | 2810 |
| 360 | AUGGGGCC A UUUAAGAG | 622 | CUCUUAAA CUGAUGAG GCCGUUAGGC CGAA IGCCCCAU | 2811 |
| 372 | AAGAGUUC U GUGUUCAU | 623 | AUGAACAC CUGAUGAG GCCGUUAGGC CGAA IAACUCUU | 2812 |
| 379 | CUGUGUUC A UCUUGAUU | 624 | AAUCAAGA CUGAUGAG GCCGUUAGGC CGAA IAACACAG | 2813 |
| 382 | UGUUCAUC U UGAUUCUU | 625 | AAGAAUCA CUGAUGAG GCCGUUAGGC CGAA IAUGAACA | 2814 |
| 389 | CUUGAUUC U UCACCUUC | 626 | GAAGGUGA CUGAUGAG GCCGUUAGGC CGAA IAAUCAAG | 2815 |
| 392 | GAUUCUUC A CCUUCUAG | 627 | CUAGAAGG CUGAUGAG GCCGUUAGGC CGAA IAAGAAUC | 2816 |
| 394 | UUCUUCAC C UUCUAGAA | 628 | UUCUAGAA CUGAUGAG GCCGUUAGGC CGAA IUGAAGAA | 2817 |
| 395 | UCUUCACC U UCUAGAAG | 629 | CUUCUAGA CUGAUGAG GCCGUUAGGC CGAA IGUGAAGA | 2818 |
| 398 | UCACCUUC U AGAAGGGG | 630 | CCCCUUCU CUGAUGAG GCCGUUAGGC CGAA IAAGGUGA | 2819 |
| 408 | GAAGGGGC C CUGAGUAA | 631 | UUACUCAG CUGAUGAG GCCGUUAGGC CGAA ICCCCUUC | 2820 |
| 409 | AAGGGGCC C UGAGUAAU | 632 | AUUACUCA CUGAUGAG GCCGUUAGGC CGAA IGCCCCUU | 2821 |
| 410 | AGGGGCCC U GAGUAAUU | 633 | AAUUACUC CUGAUGAG GCCGUUAGGC CGAA IGGCCCCU | 2822 |
| 420 | AGUAAUUC A CUCAUUCA | 634 | UGAAUGAG CUGAUGAG GCCGUUAGGC CGAA IAAUUACU | 2823 |
| 422 | UAAUUCAC U CAUUCAGC | 635 | GCUGAAUG CUGAUGAG GCCGUUAGGC CGAA IUGAAUUA | 2824 |
| 424 | AUUCACUC A UUCAGCUG | 636 | CAGCUGAA CUGAUGAG GCCGUUAGGC CGAA IAGUGAAU | 2825 |
| 428 | ACUCAUUC A GCUGAACA | 637 | UGUUCAGC CUGAUGAG GCCGUUAGGC CGAA IAAUGAGU | 2826 |
| 431 | CAUUCAGC U GAACAACA | 638 | UGUUGUUC CUGAUGAG GCCGUUAGGC CGAA ICUGAAUG | 2827 |
| 436 | AGCUGAAC A ACAAUGGC | 639 | GCCAUUGU CUGAUGAG GCCGUUAGGC CGAA IUUCAGCU | 2828 |
| 439 | UGAACAAC A AUGGCUAU | 640 | AUAGCCAU CUGAUGAG GCCGUUAGGC CGAA IUUGUUCA | 2829 |
| 445 | ACAAUGGC U AUGAAGGC | 641 | GCCUUCAU CUGAUGAG GCCGUUAGGC CGAA ICCAUUGU | 2830 |
| 454 | AUGAAGGC A UUGUCGUU | 642 | AACGACAA CUGAUGAG GCCGUUAGGC CGAA ICCUUCAU | 2831 |
| 465 | GUCGUUGC A AUCGACCC | 643 | GGGUCGAU CUGAUGAG GCCGUUAGGC CGAA ICAACGAC | 2832 |
| 472 | CAAUCGAC C CCAAUGUG | 644 | CACAUUGG CUGAUGAG GCCGUUAGGC CGAA IUCGAUUG | 2833 |
| 473 | AAUCGACC C CAAUGUGC | 645 | GCACAUUG CUGAUGAG GCCGUUAGGC CGAA IGUCGAUU | 2834 |
| 474 | AUCGACCC C AAUGUGCC | 646 | GGCACAUU CUGAUGAG GCCGUUAGGC CGAA IGGUCGAU | 2835 |
| 475 | UCGACCCC A AUGUGCCA | 647 | UGGCACAU CUGAUGAG GCCGUUAGGC CGAA IGGGUCGA | 2836 |
| 482 | CAAUGUGC C AGAAGAUG | 648 | CAUCUUCU CUGAUGAG GCCGUUAGGC CGAA ICACAUUG | 2837 |
| 483 | AAUGUGCC A GAAGAUGA | 649 | UCAUCUUC CUGAUGAG GCCGUUAGGC CGAA IGCACAUU | 2838 |
| 495 | GAUGAAAC A CUCAUUCA | 650 | UGAAUGAG CUGAUGAG GCCGUUAGGC CGAA IUUUCAUC | 2839 |
| 497 | UGAAACAC U CAUUCAAC | 651 | GUUGAAUG CUGAUGAG GCCGUUAGGC CGAA IUGUUUCA | 2840 |
| 499 | AAACACUC A UUCAACAA | 652 | UUGUUGAA CUGAUGAG GCCGUUAGGC CGAA IAGUGUUU | 2841 |
| 503 | ACUCAUUC A ACAAAUAA | 653 | UUAUUUGU CUGAUGAG GCCGUUAGGC CGAA IAAUGAGU | 2842 |
| 506 | CAUUCAAC A AAUAAAGG | 654 | CCUUUAUU CUGAUGAG GCCGUUAGGC CGAA IUUGAAUG | 2843 |
| 517 | UAAAGGAC A UGGUGACC | 655 | GGUCACCA CUGAUGAG GCCGUUAGGC CGAA IUCCUUUA | 2844 |
| 525 | AUGGUGAC C CAGGCAUC | 656 | GAUGCCUG CUGAUGAG GCCGUUAGGC CGAA IUCACCAU | 2845 |
| 526 | UGGUGACC C AGGCAUCU | 657 | AGAUGCCU CUGAUGAG GCCGUUAGGC CGAA IGUCACCA | 2846 |
| 527 | GGUGACCC A GGCAUCUC | 658 | GAGAUGCC CUGAUGAG GCCGUUAGGC CGAA IGGUCACC | 2847 |
| 531 | ACCCAGGC A UCUCUGUA | 659 | UACAGAGA CUGAUGAG GCCGUUAGGC CGAA ICCUGGGU | 2848 |
| 534 | CAGGCAUC U CUGUAUCU | 660 | AGAUACAG CUGAUGAG GCCGUUAGGC CGAA IAUGCCUG | 2849 |
| 536 | GGCAUCUC U GUAUCUGU | 661 | ACAGAUAC CUGAUGAG GCCGUUAGGC CGAA IAGAUGCC | 2850 |
| 542 | UCUGUAUC U GUUUGAAG | 662 | CUUCAAAC CUGAUGAG GCCGUUAGGC CGAA IAUACAGA | 2851 |
| 552 | UUUGAAGC U ACAGGAAA | 663 | UUUCCUGU CUGAUGAG GCCGUUAGGC CGAA ICUUCAAA | 2852 |
| 555 | GAAGCUAC A GGAAAGCG | 664 | CGCUUUCC CUGAUGAG GCCGUUAGGC CGAA IUAGCUUC | 2853 |
| 574 | UUUAUUUC A AAAAUGUU | 665 | AACAUUUU CUGAUGAG GCCGUUAGGC CGAA IAAAUAAA | 2854 |
| 585 | AAUGUUGC C AUUUUGAU | 666 | AUCAAAAU CUGAUGAG GCCGUUAGGC CGAA ICAACAUU | 2855 |
| 586 | AUGUUGCC A UUUUGAUU | 667 | AAUCAAAA CUGAUGAG GCCGUUAGGC CGAA IGCAACAU | 2856 |
| 596 | UUUGAUUC C UGAAACAU | 668 | AUGUUUCA CUGAUGAG GCCGUUAGGC CGAA IAAUCAAA | 2857 |
| 597 | UUGAUUCC U GAAACAUG | 669 | CAUGUUUC CUGAUGAG GCCGUUAGGC CGAA IGAAUCAA | 2858 |
| 603 | CCUGAAAC A UGGAAGAC | 670 | GUCUUCCA CUGAUGAG GCCGUUAGGC CGAA IUUUCAGG | 2859 |
| 612 | UGGAAGAC A AAGGCUGA | 671 | UCAGCCUU CUGAUGAG GCCGUUAGGC CGAA IUCUUCCA | 2860 |
| 618 | ACAAAGGC U GACUAUGU | 672 | ACAUAGUC CUGAUGAG GCCGUUAGGC CGAA ICCUUUGU | 2861 |
| 622 | AGGCUGAC U AUGUGAGA | 673 | UCUCACAU CUGAUGAG GCCGUUAGGC CGAA IUCAGCCU | 2862 |
| 632 | UGUGAGAC C AAAACUUG | 674 | CAAGUUUU CUGAUGAG GCCGUUAGGC CGAA IUCUCACA | 2863 |
| 633 | GUGAGACC A AAACUUGA | 675 | UCAAGUUU CUGAUGAG GCCGUUAGGC CGAA IGUCUCAC | 2864 |
| 638 | ACCAAAAC U UGAGACCU | 676 | AGGUCUCA CUGAUGAG GCCGUUAGGC CGAA IUUUUGGU | 2865 |
| 645 | CUUGAGAC C UACAAAAA | 677 | UUUUUGUA CUGAUGAG GCCGUUAGGC CGAA IUCUCAAG | 2866 |
| 646 | UUGAGACC U ACAAAAAU | 678 | AUUUUUGU CUGAUGAG GCCGUUAGGC CGAA IGUCUCAA | 2867 |
| 649 | AGACCUAC A AAAAUGCU | 679 | AGCAUUUU CUGAUGAG GCCGUUAGGC CGAA IUAGGUCU | 2868 |
| 657 | AAAAAUGC U GAUGUUCU | 680 | AGAACAUC CUGAUGAG GCCGUUAGGC CGAA ICAUUUUU | 2869 |
| 665 | UGAUGUUC U GGUUGCUG | 681 | CAGCAACC CUGAUGAG GCCGUUAGGC CGAA IAACAUCA | 2870 |
| 672 | CUGGUUGC U GAGUCUAC | 682 | GUAGACUC CUGAUGAG GCCGUUAGGC CGAA ICAACCAG | 2871 |
| 678 | GCUGAGUC U ACUCCUCC | 683 | GGAGGAGU CUGAUGAG GCCGUUAGGC CGAA IACUCAGC | 2872 |
| 681 | GAGUCUAC U CCUCCAGG | 684 | CCUGGAGG CUGAUGAG GCCGUUAGGC CGAA IUAGACUC | 2873 |
| 683 | GUCUACUC C UCCAGGUA | 685 | UACCUGGA CUGAUGAG GCCGUUAGGC CGAA IAGUAGAC | 2874 |
| 684 | UCUACUCC U CCAGGUAA | 686 | UUACCUGG CUGAUGAG GCCGUUAGGC CGAA IGAGUAGA | 2875 |
| 686 | UACUCCUC C AGGUAAUG | 687 | CAUUACCU CUGAUGAG GCCGUUAGGC CGAA IAGGAGUA | 2876 |
| 687 | ACUCCUCC A GGUAAUGA | 688 | UCAUUACC CUGAUGAG GCCGUUAGGC CGAA IGAGGAGU | 2877 |
| 701 | UGAUGAAC C CUACACUG | 689 | CAGUGUAG CUGAUGAG GCCGUUAGGC CGAA IUUCAUCA | 2878 |
| 702 | GAUGAACC C UACACUGA | 690 | UCAGUGUA CUGAUGAG GCCGUUAGGC CGAA IGUUCAUC | 2879 |
| 703 | AUGAACCC U ACACUGAG | 691 | CUCAGUGU CUGAUGAG GCCGUUAGGC CGAA IGGUUCAU | 2880 |
| 706 | AACCCUAC A CUGAGCAG | 692 | CUGCUCAG CUGAUGAG GCCGUUAGGC CGAA IUAGGGUU | 2881 |
| 708 | CCCUACAC U GAGCAGAU | 693 | AUCUGCUC CUGAUGAG GCCGUUAGGC CGAA IUGUAGGG | 2882 |
| 713 | CACUGAGC A GAUGGGCA | 694 | UGCCCAUC CUGAUGAG GCCGUUAGGC CGAA ICUCAGUG | 2883 |
| 721 | AGAUGGGC A ACUGUGGA | 695 | UCCACAGU CUGAUGAG GCCGUUAGGC CGAA ICCCAUCU | 2884 |
| 724 | UGGGCAAC U GUGGAGAG | 696 | CUCUCCAC CUGAUGAG GCCGUUAGGC CGAA IUUGCCCA | 2885 |
| 748 | AAAGGAUC C ACCUCACU | 697 | AGUGAGGU CUGAUGAG GCCGUUAGGC CGAA IAUCCUUU | 2886 |
| 749 | AAGGAUCC A CCUCACUC | 698 | GAGUGAGG CUGAUGAG GCCGUUAGGC CGAA IGAUCCUU | 2887 |
| 751 | GGAUCCAC C UCACUCCU | 699 | AGGAGUGA CUGAUGAG GCCGUUAGGC CGAA IUGGAUCC | 2888 |
| 752 | GAUCCACC U CACUCCUG | 700 | CAGGAGUG CUGAUGAG GCCGUUAGGC CGAA IGUGGAUC | 2889 |
| 754 | UCCACCUC A CUCCUGAU | 701 | AUCAGGAG CUGAUGAG GCCGUUAGGC CGAA IAGGUGGA | 2890 |
| 756 | CACCUCAC U CCUGAUUU | 702 | AAAUCAGG CUGAUGAG GCCGUUAGGC CGAA IUGAGGUG | 2891 |
| 758 | CCUCACUC C UGAUUUCA | 703 | UGAAAUCA CUGAUGAG GCCGUUAGGC CGAA IAGUGAGG | 2892 |
| 759 | CUCACUCC U GAUUUCAU | 704 | AUGAAAUC CUGAUGAG GCCGUUAGGC CGAA IGAGUGAG | 2893 |
| 766 | CUGAUUUC A UUGCAGGA | 705 | UCCUGCAA CUGAUGAG GCCGUUAGGC CGAA IAAAUCAG | 2894 |
| 771 | UUCAUUGC A GGAAAAAA | 706 | UUUUUUCC CUGAUGAG GCCGUUAGGC CGAA ICAAUGAA | 2895 |
| 786 | AAGUUAGC U GAAUAUGG | 707 | CCAUAUUC CUGAUGAG GCCGUUAGGC CGAA ICUAACUU | 2896 |
| 797 | AUAUGGAC C ACAAGGUA | 708 | UACCUUGU CUGAUGAG GCCGUUAGGC CGAA IUCCAUAU | 2897 |
| 798 | UAUGGACC A CAAGGUAA | 709 | UUACCUUG CUGAUGAG GCCGUUAGGC CGAA IGUCCAUA | 2898 |
| 800 | UGGACCAC A AGGUAAGG | 710 | CCUUACCU CUGAUGAG GCCGUUAGGC CGAA IUGGUCCA | 2899 |
| 810 | GGUAAGGC A UUUGUCCA | 711 | UGGACAAA CUGAUGAG GCCGUUAGGC CGAA ICCUUACC | 2900 |
| 817 | CAUUUGUC C AUGAGUGG | 712 | CCACUCAU CUGAUGAG GCCGUUAGGC CGAA IACAAAUG | 2901 |
| 818 | AUUUGUCC A UGAGUGGG | 713 | CCCACUCA CUGAUGAG GCCGUUAGGC CGAA IGACAAAU | 2902 |
| 828 | GAGUGGGC U CAUCUACG | 714 | CGUAGAUG CUGAUGAG GCCGUUAGGC CGAA ICCCACUC | 2903 |
| 830 | GUGGGCUC A UCUACGAU | 715 | AUCGUAGA CUGAUGAG GCCGUUAGGC CGAA IAGCCCAC | 2904 |
| 833 | GGCUCAUC U ACGAUGGG | 716 | CCCAUCGU CUGAUGAG GCCGUUAGGC CGAA IAUGAGCC | 2905 |
| 859 | ACGAGUAC A AUAAUGAU | 717 | AUCAUUAU CUGAUGAG GCCGUUAGGC CGAA IUACUCGU | 2906 |
| 877 | AGAAAUUC U ACUUAUCC | 718 | GGAUAAGU CUGAUGAG GCCGUUAGGC CGAA IAAUUUCU | 2907 |
| 880 | AAUUCUAC U UAUCCAAU | 719 | AUUGGAUA CUGAUGAG GCCGUUAGGC CGAA IUAGAAUU | 2908 |
| 885 | UACUUAUC C AAUGGAAG | 720 | CUUCCAUU CUGAUGAG GCCGUUAGGC CGAA IAUAAGUA | 2909 |
| 886 | ACUUAUCC A AUGGAAGA | 721 | UCUUCCAU CUGAUGAG GCCGUUAGGC CGAA IGAUAAGU | 2910 |
| 899 | AAGAAUAC A AGCAGUAA | 722 | UUACUGCU CUGAUGAG GCCGUUAGGC CGAA IUAUUCUU | 2911 |
| 903 | AUACAAGC A GUAAGAUG | 723 | CAUCUUAC CUGAUGAG GCCGUUAGGC CGAA ICUUGUAU | 2912 |
| 915 | AGAUGUUC A GCAGGUAU | 724 | AUACCUGC CUGAUGAG GCCGUUAGGC CGAA IAACAUCU | 2913 |
| 918 | UGUUCAGC A GGUAUUAC | 725 | GUAAUACC CUGAUGAG GCCGUUAGGC CGAA ICUGAACA | 2914 |
| 927 | GGUAUUAC U GGUACAAA | 726 | UUUGUACC CUGAUGAG GCCGUUAGGC CGAA IUAAUACC | 2915 |
| 933 | ACUGGUAC A AAUGUAGU | 727 | ACUACAUU CUGAUGAG GCCGUUAGGC CGAA IUACCAGU | 2916 |
| 953 | GAAGUGUC A GGGAGGCA | 728 | UGCCUCCC CUGAUGAG GCCGUUAGGC CGAA IACACUUC | 2917 |
| 961 | AGGGAGGC A GCUGUUAC | 729 | GUAACAGC CUGAUGAG GCCGUUAGGC CGAA ICCUCCCU | 2918 |
| 964 | GAGGCAGC U GUUACACC | 730 | GGUGUAAC CUGAUGAG GCCGUUAGGC CGAA ICUGCCUC | 2919 |
| 970 | GCUGUUAC A CCAAAAGA | 731 | UCUUUUGG CUGAUGAG GCCGUUAGGC CGAA IUAACAGC | 2920 |
| 972 | UGUUACAC C AAAAGAUG | 732 | CAUCUUUU CUGAUGAG GCCGUUAGGC CGAA IUGUAACA | 2921 |
| 973 | GUUACACC A AAAGAUGC | 733 | GCAUCUUU CUGAUGAG GCCGUUAGGC CGAA IGUGUAAC | 2922 |
| 982 | AAAGAUGC A CAUUCAAU | 734 | AUUGAAUG CUGAUGAG GCCGUUAGGC CGAA ICAUCUUU | 2923 |
| 984 | AGAUGCAC A UUCAAUAA | 735 | UUAUUGAA CUGAUGAG GCCGUUAGGC CGAA IUGCAUCU | 2924 |
| 988 | GCACAUUC A AUAAAGUU | 736 | AACUUUAU CUGAUGAG GCCGUUAGGC CGAA IAAUGUGC | 2925 |
| 999 | AAAGUUAC A GGACUCUA | 737 | UAGAGUCC CUGAUGAG GCCGUUAGGC CGAA IUAACUUU | 2926 |
| 1004 | UACAGGAC U CUAUGAAA | 738 | UUUCAUAG CUGAUGAG GCCGUUAGGC CGAA IUCCUGUA | 2927 |
| 1006 | CAGGACUC U AUGAAAAA | 739 | UUUUUCAU CUGAUGAG GCCGUUAGGC CGAA IAGUCCUG | 2928 |
| 1031 | GUUUGUUC U CCAAUCCC | 740 | GGGAUUGG CUGAUGAG GCCGUUAGGC CGAA IAACAAAC | 2929 |
| 1033 | UUGUUCUC C AAUCCCGC | 741 | GCGGGAUU CUGAUGAG GCCGUUAGGC CGAA IAGAACAA | 2930 |
| 1034 | UGUUCUCC A AUCCCGCC | 742 | GGCGGGAU CUGAUGAG GCCGUUAGGC CGAA IGAGAACA | 2931 |
| 1038 | CUCCAAUC C CGCCAGAC | 743 | GUCUGGCG CUGAUGAG GCCGUUAGGC CGAA IAUUGGAG | 2932 |
| 1039 | UCCAAUCC C GCCAGACG | 744 | CGUCUGGC CUGAUGAG GCCGUUAGGC CGAA IGAUUGGA | 2933 |
| 1042 | AAUCCCGC C AGACGGAG | 745 | CUCCGUCU CUGAUGAG GCCGUUAGGC CGAA ICGGGAUU | 2934 |
| 1043 | AUCCCGCC A GACGGAGA | 746 | UCUCCGUC CUGAUGAG GCCGUUAGGC CGAA IGCGGGAU | 2935 |
| 1056 | GAGAAGGC U UCUAUAAU | 747 | AUUAUAGA CUGAUGAG GCCGUUAGGC CGAA ICCUUCUC | 2936 |
| 1059 | AAGGCUUC U AUAAUGUU | 748 | AACAUUAU CUGAUGAG GCCGUUAGGC CGAA IAAGCCUU | 2937 |
| 1071 | AUGUUUGC A CAACAUGU | 749 | ACAUGUUG CUGAUGAG GCCGUUAGGC CGAA ICAAACAU | 2938 |
| 1073 | GUUUGCAC A ACAUGUUG | 750 | CAACAUGU CUGAUGAG GCCGUUAGGC CGAA IUGCAAAC | 2939 |
| 1076 | UGCACAAC A UGUUGAUU | 751 | AAUCAACA CUGAUGAG GCCGUUAGGC CGAA IUUGUGCA | 2940 |
| 1086 | GUUGAUUC U AUAGUUGA | 752 | UCAACUAU CUGAUGAG GCCGUUAGGC CGAA IAAUCAAC | 2941 |
| 1099 | UUGAAUUC U GUACAGAA | 753 | UUCUGUAC CUGAUGAG GCCGUUAGGC CGAA IAAUUCAA | 2942 |
| 1104 | UUCUGUAC A GAACAAAA | 754 | UUUUGUUC CUGAUGAG GCCGUUAGGC CGAA IUACAGAA | 2943 |
| 1109 | UACAGAAC A AAACCACA | 755 | UGUGGUUU CUGAUGAG GCCGUUAGGC CGAA IUUCUGUA | 2944 |
| 1114 | AACAAAAC C ACAACAAA | 756 | UUUGUUGU CUGAUGAG GCCGUUAGGC CGAA IUUUUGUU | 2945 |
| 1115 | ACAAAACC A CAACAAAG | 757 | CUUUGUUG CUGAUGAG GCCGUUAGGC CGAA IGUUUUGU | 2946 |
| 1117 | AAAACCAC A ACAAAGAA | 758 | UUCUUUGU CUGAUGAG GCCGUUAGGC CGAA IUGGUUUU | 2947 |
| 1120 | ACCACAAC A AAGAAGCU | 759 | AGCUUCUU CUGAUGAG GCCGUUAGGC CGAA IUUGUGGU | 2948 |
| 1128 | AAAGAAGC U CCAAACAA | 760 | UUGUUUGG CUGAUGAG GCCGUUAGGC CGAA ICUUCUUU | 2949 |
| 1130 | AGAAGCUC C AAACAAGC | 761 | GCUUGUUU CUGAUGAG GCCGUUAGGC CGAA IAGCUUCU | 2950 |
| 1131 | GAAGCUCC A AACAAGCA | 762 | UGCUUGUU CUGAUGAG GCCGUUAGGC CGAA IGAGCUUC | 2951 |
| 1135 | CUCCAAAC A AGCAAAAU | 763 | AUUUUGCU CUGAUGAG GCCGUUAGGC CGAA IUUUGGAG | 2952 |
| 1139 | AAACAAGC A AAAUCAAA | 764 | UUUGAUUU CUGAUGAG GCCGUUAGGC CGAA ICUUGUUU | 2953 |
| 1145 | GCAAAAUC A AAAAUGCA | 765 | UGCAUUUU CUGAUGAG GCCGUUAGGC CGAA IAUUUUGC | 2954 |
| 1153 | AAAAAUGC A AUCUCCGA | 766 | UCGGAGAU CUGAUGAG GCCGUUAGGC CGAA ICAUUUUU | 2955 |
| 1157 | AUGCAAUC U CCGAAGCA | 767 | UGCUUCGG CUGAUGAG GCCGUUAGGC CGAA IAUUGCAU | 2956 |
| 1159 | GCAAUCUC C GAAGCACA | 768 | UGUGCUUC CUGAUGAG GCCGUUAGGC CGAA IAGAUUGC | 2957 |
| 1165 | UCCGAAGC A CAUGGGAA | 769 | UUCCCAUG CUGAUGAG GCCGUUAGGC CGAA ICUUCGGA | 2958 |
| 1167 | CGAAGCAC A UGGGAAGU | 770 | ACUUCCCA CUGAUGAG GCCGUUAGGC CGAA IUGCUUCG | 2959 |
| 1180 | AAGUGAUC C GUGAUUCU | 771 | AGAAUCAC CUGAUGAG GCCGUUAGGC CGAA IAUCACUU | 2960 |
| 1188 | CGUGAUUC U GAGGACUU | 772 | AAGUCCUC CUGAUGAG GCCGUUAGGC CGAA IAAUCACG | 2961 |
| 1195 | CUGAGGAC U UUAAGAAA | 773 | UUUCUUAA CUGAUGAG GCCGUUAGGC CGAA IUCCUCAG | 2962 |
| 1206 | AAGAAAAC C ACUCCUAU | 774 | AUAGGAGU CUGAUGAG GCCGUUAGGC CGAA IUUUUCUU | 2963 |
| 1207 | AGAAAACC A CUCCUAUG | 775 | CAUAGGAG CUGAUGAG GCCGUUAGGC CGAA IGUUUUCU | 2964 |
| 1209 | AAAACCAC U CCUAUGAC | 776 | GUCAUAGG CUGAUGAG GCCGUUAGGC CGAA IUGGUUUU | 2965 |
| 1211 | AACCACUC C UAUGACAA | 777 | UUGUCAUA CUGAUGAG GCCGUUAGGC CGAA IAGUGGUU | 2966 |
| 1212 | ACCACUCC U AUGACAAC | 778 | GUUGUCAU CUGAUGAG GCCGUUAGGC CGAA IGAGUGGU | 2967 |
| 1218 | CCUAUGAC A ACACAGCC | 779 | GGCUGUGU CUGAUGAG GCCGUUAGGC CGAA IUCAUAGG | 2968 |
| 1221 | AUGACAAC A CAGCCACC | 780 | GGUGGCUG CUGAUGAG GCCGUUAGGC CGAA IUUGUCAU | 2969 |
| 1223 | GACAACAC A GCCACCAA | 781 | UUGGUGGC CUGAUGAG GCCGUUAGGC CGAA IUGUUGUC | 2970 |
| 1226 | AACACAGC C ACCAAAUC | 782 | GAUUUGGU CUGAUGAG GCCGUUAGGC CGAA ICUGUGUU | 2971 |
| 1227 | ACACAGCC A CCAAAUCC | 783 | GGAUUUGG CUGAUGAG GCCGUUAGGC CGAA IGCUGUGU | 2972 |
| 1229 | ACAGCCAC C AAAUCCCA | 784 | UGGGAUUU CUGAUGAG GCCGUUAGGC CGAA IUGGCUGU | 2973 |
| 1230 | CAGCCACC A AAUCCCAC | 785 | GUGGGAUU CUGAUGAG GCCGUUAGGC CGAA IGUGGCUG | 2974 |
| 1235 | ACCAAAUC C CACCUUCU | 786 | AGAAGGUG CUGAUGAG GCCGUUAGGC CGAA IAUUUGGU | 2975 |
| 1236 | CCAAAUCC C ACCUUCUC | 787 | GAGAAGGU CUGAUGAG GCCGUUAGGC CGAA IGAUUUGG | 2976 |
| 1237 | CAAAUCCC A CCUUCUCA | 788 | UGAGAAGG CUGAUGAG GCCGUUAGGC CGAA IGGAUUUG | 2977 |
| 1239 | AAUCCCAC C UUCUCAUU | 789 | AAUGAGAA CUGAUGAG GCCGUUAGGC CGAA IUGGGAUU | 2978 |
| 1240 | AUCCCACC U UCUCAUUG | 790 | CAAUGAGA CUGAUGAG GCCGUUAGGC CGAA IGUGGGAU | 2979 |
| 1243 | CCACCUUC U CAUUGCUG | 791 | CAGCAAUG CUGAUGAG GCCGUUAGGC CGAA IAAGGUGG | 2980 |
| 1245 | ACCUUCUC A UUGCUGCA | 792 | UGCAGCAA CUGAUGAG GCCGUUAGGC CGAA IAGAAGGU | 2981 |
| 1250 | CUCAUUGC U GCAGAUUG | 793 | CAAUCUGC CUGAUGAG GCCGUUAGGC CGAA ICAAUGAG | 2982 |
| 1253 | AUUGCUGC A GAUUGGAC | 794 | GUCCAAUC CUGAUGAG GCCGUUAGGC CGAA ICAGCAAU | 2983 |
| 1262 | GAUUGGAC A AAGAAUUG | 795 | CAAUUCUU CUGAUGAG GCCGUUAGGC CGAA IUCCAAUC | 2984 |
| 1282 | GUUUAGUC C UUGACAAA | 796 | UUUGUCAA CUGAUGAG GCCGUUAGGC CGAA IACUAAAC | 2985 |
| 1283 | UUUAGUCC U UGACAAAU | 797 | AUUUGUCA CUGAUGAG GCCGUUAGGC CGAA IGACUAAA | 2986 |
| 1288 | UCCUUGAC A AAUCUGGA | 798 | UCCAGAUU CUGAUGAG GCCGUUAGGC CGAA IUCAAGGA | 2987 |
| 1293 | GACAAAUC U GGAAGCAU | 799 | AUGCUUCC CUGAUGAG GCCGUUAGGC CGAA IAUUUGUC | 2988 |
| 1300 | CUGGAAGC A UGGCGACU | 800 | AGUCGCCA CUGAUGAG GCCGUUAGGC CGAA ICUUCCAG | 2989 |
| 1308 | AUGGCGAC U GGUAACCG | 801 | CGGUUACC CUGAUGAG GCCGUUAGGC CGAA IUCGCCAU | 2990 |
| 1315 | CUGGUAAC C GCCUCAAU | 802 | AUUGAGGC CUGAUGAG GCCGUUAGGC CGAA IUUACCAG | 2991 |
| 1318 | GUAACCGC C UCAAUCGA | 803 | UCGAUUGA CUGAUGAG GCCGUUAGGC CGAA ICGGUUAC | 2992 |
| 1319 | UAACCGCC U CAAUCGAC | 804 | GUCGAUUG CUGAUGAG GCCGUUAGGC CGAA IGCGGUUA | 2993 |
| 1321 | ACCGCCUC A AUCGACUG | 805 | CAGUCGAU CUGAUGAG GCCGUUAGGC CGAA IAGGCGGU | 2994 |
| 1328 | CAAUCGAC U GAAUCAAG | 806 | CUUGAUUC CUGAUGAG GCCGUUAGGC CGAA IUCGAUUG | 2995 |
| 1334 | ACUGAAUC A AGCAGGCC | 807 | GGCCUGCU CUGAUGAG GCCGUUAGGC CGAA IAUUCAGU | 2996 |
| 1338 | AAUCAAGC A GGCCAGCU | 808 | AGCUGGCC CUGAUGAG GCCGUUAGGC CGAA ICUUGAUU | 2997 |
| 1342 | AAGCAGGC C AGCUUUUC | 809 | GAAAAGCU CUGAUGAG GCCGUUAGGC CGAA ICCUGCUU | 2998 |
| 1343 | AGCAGGCC A GCUUUUCC | 810 | GGAAAAGC CUGAUGAG GCCGUUAGGC CGAA IGCCUGCU | 2999 |
| 1346 | AGGCCAGC U UUUCCUGC | 811 | GCAGGAAA CUGAUGAG GCCGUUAGGC CGAA ICUGGCCU | 3000 |
| 1351 | AGCUUUUC C UGCUGCAG | 812 | CUGCAGCA CUGAUGAG GCCGUUAGGC CGAA IAAAAGCU | 3001 |
| 1352 | GCUUUUCC U GCUGCAGA | 813 | UCUGCAGC CUGAUGAG GCCGUUAGGC CGAA IGAAAAGC | 3002 |
| 1355 | UUUCCUGC U GCAGACAG | 814 | CUGUCUGC CUGAUGAG GCCGUUAGGC CGAA ICAGGAAA | 3003 |
| 1358 | CCUGCUGC A GACAGUUG | 815 | CAACUGUC CUGAUGAG GCCGUUAGGC CGAA ICAGCAGG | 3004 |
| 1362 | CUGCAGAC A GUUGAGCU | 816 | AGCUCAAC CUGAUGAG GCCGUUAGGC CGAA IUCUGCAG | 3005 |
| 1370 | AGUUGAGC U GGGGUCCU | 817 | AGGACCCC CUGAUGAG GCCGUUAGGC CGAA ICUCAACU | 3006 |
| 1377 | CUGGGGUC C UGGGUUGG | 818 | CCAACCCA CUGAUGAG GCCGUUAGGC CGAA IACCCCAG | 3007 |
| 1378 | UGGGGUCC U GGGUUGGG | 819 | CCCAACCC CUGAUGAG GCCGUUAGGC CGAA IGACCCCA | 3008 |
| 1395 | AUGGUGAC A UUUGACAG | 820 | CUGUCAAA CUGAUGAG GCCGUUAGGC CGAA IUCACCAU | 3009 |
| 1402 | CAUUUGAC A GUGCUGCC | 821 | GGCAGCAC CUGAUGAG GCCGUUAGGC CGAA IUCAAAUG | 3010 |
| 1407 | GACAGUGC U GCCCAUGU | 822 | ACAUGGGC CUGAUGAG GCCGUUAGGC CGAA ICACUGUC | 3011 |
| 1410 | AGUGCUGC C CAUGUACA | 823 | UGUACAUG CUGAUGAG GCCGUUAGGC CGAA ICAGCACU | 3012 |
| 1411 | GUGCUGCC C AUGUACAA | 824 | UUGUACAU CUGAUGAG GCCGUUAGGC CGAA IGCAGCAC | 3013 |
| 1412 | UGCUGCCC A UGUACAAA | 825 | UUUGUACA CUGAUGAG GCCGUUAGGC CGAA IGGCAGCA | 3014 |
| 1418 | CCAUGUAC A AAGUGAAC | 826 | GUUCACUU CUGAUGAG GCCGUUAGGC CGAA IUACAUGG | 3015 |
| 1427 | AAGUGAAC U CAUACAGA | 827 | UCUGUAUG CUGAUGAG GCCGUUAGGC CGAA IUUCACUU | 3016 |
| 1429 | GUGAACUC A UACAGAUA | 828 | UAUCUGUA CUGAUGAG GCCGUUAGGC CGAA IAGUUCAC | 3017 |
| 1433 | ACUCAUAC A GAUAAACA | 829 | UGUUUAUC CUGAUGAG GCCGUUAGGC CGAA IUAUGAGU | 3018 |
| 1441 | AGAUAAAC A GUGGCAGU | 830 | ACUGCCAC CUGAUGAG GCCGUUAGGC CGAA IUUUAUCU | 3019 |
| 1447 | ACAGUGGC A GUGACAGG | 831 | CCUGUCAC CUGAUGAG GCCGUUAGGC CGAA ICCACUGU | 3020 |
| 1453 | GCAGUGAC A GGGACACA | 832 | UGUGUCCC CUGAUGAG GCCGUUAGGC CGAA IUCACUGC | 3021 |
| 1459 | ACAGGGAC A CACUCGCC | 833 | GGCGAGUG CUGAUGAG GCCGUUAGGC CGAA IUCCCUGU | 3022 |
| 1461 | AGGGACAC A CUCGCCAA | 834 | UUGGCGAG CUGAUGAG GCCGUUAGGC CGAA IUGUCCCU | 3023 |
| 1463 | GGACACAC U CGCCAAAA | 835 | UUUUGGCG CUGAUGAG GCCGUUAGGC CGAA IUGUGUCC | 3024 |
| 1467 | ACACUCGC C AAAAGAUU | 836 | AAUCUUUU CUGAUGAG GCCGUUAGGC CGAA ICGAGUGU | 3025 |
| 1468 | CACUCGCC A AAAGAUUA | 837 | UAAUCUUU CUGAUGAG GCCGUUAGGC CGAA IGCGAGUG | 3026 |
| 1478 | AAGAUUAC C UGCAGCAG | 838 | CUGCUGCA CUGAUGAG GCCGUUAGGC CGAA IUAAUCUU | 3027 |
| 1479 | AGAUUACC U GCAGCAGC | 839 | GCUGCUGC CUGAUGAG GCCGUUAGGC CGAA IGUAAUCU | 3028 |
| 1482 | UUACCUGC A GCAGCUUC | 840 | GAAGCUGC CUGAUGAG GCCGUUAGGC CGAA ICAGGUAA | 3029 |
| 1485 | CCUGCAGC A GCUUCAGG | 841 | CCUGAAGC CUGAUGAG GCCGUUAGGC CGAA ICUGCAGG | 3030 |
| 1488 | GCAGCAGC U UCAGGAGG | 842 | CCUCCUGA CUGAUGAG GCCGUUAGGC CGAA ICUGCUGC | 3031 |
| 1491 | GCAGCUUC A GGAGGGAC | 843 | GUCCCUCC CUGAUGAG GCCGUUAGGC CGAA IAAGCUGC | 3032 |
| 1503 | GGGACGUC C AUCUGCAG | 844 | CUGCAGAU CUGAUGAG GCCGUUAGGC CGAA IACGUCCC | 3033 |
| 1504 | GGACGUCC A UCUGCAGC | 845 | GCUGCAGA CUGAUGAG GCCGUUAGGC CGAA IGACGUCC | 3034 |
| 1507 | CGUCCAUC U GCAGCGGG | 846 | CCCGCUGC CUGAUGAG GCCGUUAGGC CGAA IAUGGACG | 3035 |
| 1510 | CCAUCUGC A GCGGGCUU | 847 | AAGCCCGC CUGAUGAG GCCGUUAGGC CGAA ICAGAUGG | 3036 |
| 1517 | CAGCGGGC U UCGAUCGG | 848 | CCGAUCGA CUGAUGAG GCCGUUAGGC CGAA ICCCGCUG | 3037 |
| 1527 | CGAUCGGC A UUUACUGU | 849 | ACAGUAAA CUGAUGAG GCCGUUAGGC CGAA ICCGAUCG | 3038 |
| 1533 | GCAUUUAC U GUGAUUAG | 850 | CUAAUCAC CUGAUGAG GCCGUUAGGC CGAA IUAAAUGC | 3039 |
| 1553 | GAAAUAUC C AACUGAUG | 851 | CAUCAGUU CUGAUGAG GCCGUUAGGC CGAA IAUAUUUC | 3040 |
| 1554 | AAAUAUCC A ACUGAUGG | 852 | CCAUCAGU CUGAUGAG GCCGUUAGGC CGAA IGAUAUUU | 3041 |
| 1557 | UAUCCAAC U GAUGGAUC | 853 | GAUCCAUC CUGAUGAG GCCGUUAGGC CGAA IUUGGAUA | 3042 |
| 1566 | GAUGGAUC U GAAAUUGU | 854 | ACAAUUUC CUGAUGAG GCCGUUAGGC CGAA IAUCCAUC | 3043 |
| 1577 | AAUUGUGC U GCUGACGG | 855 | CCGUCAGC CUGAUGAG GCCGUUAGGC CGAA ICACAAUU | 3044 |
| 1580 | UGUGCUGC U GACGGAUG | 856 | CAUCCGUC CUGAUGAG GCCGUUAGGC CGAA ICAGCACA | 3045 |
| 1597 | GGGAAGAC A ACACUAUA | 857 | UAUAGUGU CUGAUGAG GCCGUUAGGC CGAA IUCUUCCC | 3046 |
| 1600 | AAGACAAC A CUAUAAGU | 858 | ACUUAUAG CUGAUGAG GCCGUUAGGC CGAA IUUGUCUU | 3047 |
| 1602 | GACAACAC U AUAAGUGG | 859 | CCACUUAU CUGAUGAG GCCGUUAGGC CGAA IUGUUGUC | 3048 |
| 1615 | GUGGGUGC U UUAACGAG | 860 | CUCGUUAA CUGAUGAG GCCGUUAGGC CGAA ICACCCAC | 3049 |
| 1627 | ACGAGGUC A AACAAAGU | 861 | ACUUUGUU CUGAUGAG GCCGUUAGGC CGAA IACCUCGU | 3050 |
| 1631 | GGUCAAAC A AAGUGGUG | 862 | CACCACUU CUGAUGAG GCCGUUAGGC CGAA IUUUGACC | 3051 |
| 1641 | AGUGGUGC C AUCAUCCA | 863 | UGGAUGAU CUGAUGAG GCCGUUAGGC CGAA ICACCACU | 3052 |
| 1642 | GUGGUGCC A UCAUCCAC | 864 | GUGGAUGA CUGAUGAG GCCGUUAGGC CGAA IGCACCAC | 3053 |
| 1645 | GUGCCAUC A UCCACACA | 865 | UGUGUGGA CUGAUGAG GCCGUUAGGC CGAA IAUGGCAC | 3054 |
| 1648 | CCAUCAUC C ACACAGUC | 866 | GACUGUGU CUGAUGAG GCCGUUAGGC CGAA IAUGAUGG | 3055 |
| 1649 | CAUCAUCC A CACAGUCG | 867 | CGACUGUG CUGAUGAG GCCGUUAGGC CGAA IGAUGAUG | 3056 |
| 1651 | UCAUCCAC A CAGUCGCU | 868 | AGCGACUG CUGAUGAG GCCGUUAGGC CGAA IUGGAUGA | 3057 |
| 1653 | AUCCACAC A GUCGCUUU | 869 | AAAGCGAC CUGAUGAG GCCGUUAGGC CGAA IUGUGGAU | 3058 |
| 1659 | ACAGUCGC U UUGGGGCC | 870 | GGCCCCAA CUGAUGAG GCCGUUAGGC CGAA ICGACUGU | 3059 |
| 1667 | UUUGGGGC C CUCUGCAG | 871 | CUGCAGAG CUGAUGAG GCCGUUAGGC CGAA ICCCCAAA | 3060 |
| 1668 | UUGGGGCC C UCUGCAGC | 872 | GCUGCAGA CUGAUGAG GCCGUUAGGC CGAA IGCCCCAA | 3061 |
| 1669 | UGGGGCCC U CUGCAGCU | 873 | AGCUGCAG CUGAUGAG GCCGUUAGGC CGAA IGGCCCCA | 3062 |
| 1671 | GGGCCCUC U GCAGCUCA | 874 | UGAGCUGC CUGAUGAG GCCGUUAGGC CGAA IAGGGCCC | 3063 |
| 1674 | CCCUCUGC A GCUCAAGA | 875 | UCUUGAGC CUGAUGAG GCCGUUAGGC CGAA ICAGAGGG | 3064 |
| 1677 | UCUGCAGC U CAAGAACU | 876 | AGUUCUUG CUGAUGAG GCCGUUAGGC CGAA ICUGCAGA | 3065 |
| 1679 | UGCAGCUC A AGAACUAG | 877 | CUAGUUCU CUGAUGAG GCCGUUAGGC CGAA IAGCUGCA | 3066 |
| 1685 | UCAAGAAC U AGAGGAGC | 878 | GCUCCUCU CUGAUGAG GCCGUUAGGC CGAA IUUCUUGA | 3067 |
| 1694 | AGAGGAGC U GUCCAAAA | 879 | UUUUGGAC CUGAUGAG GCCGUUAGGC CGAA ICUCCUCU | 3068 |
| 1698 | GAGCUGUC C AAAAUGAC | 880 | GUCAUUUU CUGAUGAG GCCGUUAGGC CGAA IACAGCUC | 3069 |
| 1699 | AGCUGUCC A AAAUGACA | 881 | UGUCAUUU CUGAUGAG GCCGUUAGGC CGAA IGACAGCU | 3070 |
| 1707 | AAAAUGAC A GGAGGUUU | 882 | AAACCUCC CUGAUGAG GCCGUUAGGC CGAA IUCAUUUU | 3071 |
| 1718 | AGGUUUAC A GACAUAUG | 883 | CAUAUGUC CUGAUGAG GCCGUUAGGC CGAA IUAAACCU | 3072 |
| 1722 | UUACAGAC A UAUGCUUC | 884 | GAAGCAUA CUGAUGAG GCCGUUAGGC CGAA IUCUGUAA | 3073 |
| 1728 | ACAUAUGC U UCAGAUCA | 885 | UGAUCUGA CUGAUGAG GCCGUUAGGC CGAA ICAUAUGU | 3074 |
| 1731 | UAUGCUUC A GAUCAAGU | 886 | ACUUGAUC CUGAUGAG GCCGUUAGGC CGAA IAAGCAUA | 3075 |
| 1736 | UUCAGAUC A AGUUCAGA | 887 | UCUGAACU CUGAUGAG GCCGUUAGGC CGAA IAUCUGAA | 3076 |
| 1742 | UCAAGUUC A GAACAAUG | 888 | CAUUGUUC CUGAUGAG GCCGUUAGGC CGAA IAACUUGA | 3077 |
| 1747 | UUCAGAAC A AUGGCCUC | 889 | GAGGCCAU CUGAUGAG GCCGUUAGGC CGAA IUUCUGAA | 3078 |
| 1753 | ACAAUGGC C UCAUUGAU | 890 | AUCAAUGA CUGAUGAG GCCGUUAGGC CGAA ICCAUUGU | 3079 |
| 1754 | CAAUGGCC U CAUUGAUG | 891 | CAUCAAUG CUGAUGAG GCCGUUAGGC CGAA IGCCAUUG | 3080 |
| 1756 | AUGGCCUC A UUGAUGCU | 892 | AGCAUCAA CUGAUGAG GCCGUUAGGC CGAA IAGGCCAU | 3081 |
| 1764 | AUUGAUGC U UUUGGGGC | 893 | GCCCCAAA CUGAUGAG GCCGUUAGGC CGAA ICAUCAAU | 3082 |
| 1773 | UUUGGGGC C CUUUCAUC | 894 | GAUGAAAG CUGAUGAG GCCGUUAGGC CGAA ICCCCAAA | 3083 |
| 1774 | UUGGGGCC C UUUCAUCA | 895 | UGAUGAAA CUGAUGAG GCCGUUAGGC CGAA IGCCCCAA | 3084 |
| 1775 | UGGGGCCC U UUCAUCAG | 896 | CUGAUGAA CUGAUGAG GCCGUUAGGC CGAA IGGCCCCA | 3085 |
| 1779 | GCCCUUUC A UCAGGAAA | 897 | UUUCCUGA CUGAUGAG GCCGUUAGGC CGAA IAAAGGGC | 3086 |
| 1782 | CUUUCAUC A GGAAAUGG | 898 | CCAUUUCC CUGAUGAG GCCGUUAGGC CGAA IAUGAAAG | 3087 |
| 1794 | AAUGGAGC U GUCUCUCA | 899 | UGAGAGAC CUGAUGAG GCCGUUAGGC CGAA ICUCCAUU | 3088 |
| 1798 | GAGCUGUC U CUCAGCGC | 900 | GCGCUGAG CUGAUGAG GCCGUUAGGC CGAA IACAGCUC | 3089 |
| 1800 | GCUGUCUC U CAGCGCUC | 901 | GAGCGCUG CUGAUGAG GCCGUUAGGC CGAA IAGACAGC | 3090 |
| 1802 | UGUCUCUC A GCGCUCCA | 902 | UGGAGCGC CUGAUGAG GCCGUUAGGC CGAA IAGAGACA | 3091 |
| 1807 | CUCAGCGC U CCAUCCAG | 903 | CUGGAUGG CUGAUGAG GCCGUUAGGC CGAA ICGCUGAG | 3092 |
| 1809 | CAGCGCUC C AUCCAGCU | 904 | AGCUGGAU CUGAUGAG GCCGUUAGGC CGAA IAGCGCUG | 3093 |
| 1810 | AGCGCUCC A UCCAGCUU | 905 | AAGCUGGA CUGAUGAG GCCGUUAGGC CGAA IGAGCGCU | 3094 |
| 1813 | GCUCCAUC C AGCUUGAG | 906 | CUCAAGCU CUGAUGAG GCCGUUAGGC CGAA IAUGGAGC | 3095 |
| 1814 | CUCCAUCC A GCUUGAGA | 907 | UCUCAAGC CUGAUGAG GCCGUUAGGC CGAA IGAUGGAG | 3096 |
| 1817 | CAUCCAGC U UGAGAGUA | 908 | UACUCUCA CUGAUGAG GCCGUUAGGC CGAA ICUGGAUG | 3097 |
| 1836 | GGAUUAAC C CUCCAGAA | 909 | UUCUGGAG CUGAUGAG GCCGUUAGGC CGAA IUUAAUCC | 3098 |
| 1837 | GAUUAACC C UCCAGAAC | 910 | GUUCUGGA CUGAUGAG GCCGUUAGGC CGAA IGUUAAUC | 3099 |
| 1838 | AUUAACCC U CCAGAACA | 911 | UGUUCUGG CUGAUGAG GCCGUUAGGC CGAA IGGUUAAU | 3100 |
| 1840 | UAACCCUC C AGAACAGC | 912 | GCUGUUCU CUGAUGAG GCCGUUAGGC CGAA IAGGGUUA | 3101 |
| 1841 | AACCCUCC A GAACAGCC | 913 | GGCUGUUC CUGAUGAG GCCGUUAGGC CGAA IGAGGGUU | 3102 |
| 1846 | UCCAGAAC A GCCAGUGG | 914 | CCACUGGC CUGAUGAG GCCGUUAGGC CGAA IUUCUGGA | 3103 |
| 1849 | AGAACAGC C AGUGGAUG | 915 | CAUCCACU CUGAUGAG GCCGUUAGGC CGAA ICUGUUCU | 3104 |
| 1850 | GAACAGCC A GUGGAUGA | 916 | UCAUCCAC CUGAUGAG GCCGUUAGGC CGAA IGCUGUUC | 3105 |
| 1864 | UGAAUGGC A CAGUGAUC | 917 | GAUCACUG CUGAUGAG GCCGUUAGGC CGAA ICCAUUCA | 3106 |
| 1866 | AAUGGCAC A GUGAUCGU | 918 | ACGAUCAC CUGAUGAG GCCGUUAGGC CGAA IUGCCAUU | 3107 |
| 1879 | UCGUGGAC A GCACCGUG | 919 | CACGGUGC CUGAUGAG GCCGUUAGGC CGAA IUCCACGA | 3108 |
| 1882 | UGGACAGC A CCGUGGGA | 920 | UCCCACGG CUGAUGAG GCCGUUAGGC CGAA ICUGUCCA | 3109 |
| 1884 | GACAGCAC C GUGGGAAA | 921 | UUUCCCAC CUGAUGAG GCCGUUAGGC CGAA IUGCUGUC | 3110 |
| 1897 | GAAAGGAC A CUUUGUUU | 922 | AAACAAAG CUGAUGAG GCCGUUAGGC CGAA IUCCUUUC | 3111 |
| 1899 | AAGGACAC U UUGUUUCU | 923 | AGAAACAA CUGAUGAG GCCGUUAGGC CGAA IUGUCCUU | 3112 |
| 1907 | UUUGUUUC U UAUCACCU | 924 | AGGUGAUA CUGAUGAG GCCGUUAGGC CGAA IAAACAAA | 3113 |
| 1912 | UUCUUAUC A CCUGGACA | 925 | UGUCCAGG CUGAUGAG GCCGUUAGGC CGAA IAUAAGAA | 3114 |
| 1914 | CUUAUCAC C UGGACAAC | 926 | GUUGUCCA CUGAUGAG GCCGUUAGGC CGAA IUGAUAAG | 3115 |
| 1915 | UUAUCACC U GGACAACG | 927 | CGUUGUCC CUGAUGAG GCCGUUAGGC CGAA IGUGAUAA | 3116 |
| 1920 | ACCUGGAC A ACGCAGCC | 928 | GGCUGCGU CUGAUGAG GCCGUUAGGC CGAA IUCCAGGU | 3117 |
| 1925 | GACAACGC A GCCUCCCC | 929 | GGGGAGGC CUGAUGAG GCCGUUAGGC CGAA ICGUUGUC | 3118 |
| 1928 | AACGCAGC C UCCCCAAA | 930 | UUUGGGGA CUGAUGAG GCCGUUAGGC CGAA ICUGCGUU | 3119 |
| 1929 | ACGCAGCC U CCCCAAAU | 931 | AUUUGGGG CUGAUGAG GCCGUUAGGC CGAA IGCUGCGU | 3120 |
| 1931 | GCAGCCUC C CCAAAUCC | 932 | GGAUUUGG CUGAUGAG GCCGUUAGGC CGAA IAGGCUGC | 3121 |
| 1932 | CAGCCUCC C CAAAUCCU | 933 | AGGAUUUG CUGAUGAG GCCGUUAGGC CGAA IGAGGCUG | 3122 |
| 1933 | AGCCUCCC C AAAUCCUU | 934 | AAGGAUUU CUGAUGAG GCCGUUAGGC CGAA IGGAGGCU | 3123 |
| 1934 | GCCUCCCC A AAUCCUUC | 935 | GAAGGAUU CUGAUGAG GCCGUUAGGC CGAA IGGGAGGC | 3124 |
| 1939 | CCCAAAUC C UUCUCUGG | 936 | CCAGAGAA CUGAUGAG GCCGUUAGGC CGAA IAUUUGGG | 3125 |
| 1940 | CCAAAUCC U UCUCUGGG | 937 | CCCAGAGA CUGAUGAG GCCGUUAGGC CGAA IGAUUUGG | 3126 |
| 1943 | AAUCCUUC U CUGGGAUC | 938 | GAUCCCAG CUGAUGAG GCCGUUAGGC CGAA IAAGGAUU | 3127 |
| 1945 | UCCUUCUC U GGGAUCCC | 939 | GGGAUCCC CUGAUGAG GCCGUUAGGC CGAA IAGAAGGA | 3128 |
| 1952 | CUGGGAUC C CAGUGGAC | 940 | GUCCACUG CUGAUGAG GCCGUUAGGC CGAA IAUCCCAG | 3129 |
| 1953 | UGGGAUCC C AGUGGACA | 941 | UGUCCACU CUGAUGAG GCCGUUAGGC CGAA IGAUCCCA | 3130 |
| 1954 | GGGAUCCC A GUGGACAG | 942 | CUGUCCAC CUGAUGAG GCCGUUAGGC CGAA IGGAUCCC | 3131 |
| 1961 | CAGUGGAC A GAAGCAAG | 943 | CUUGCUUC CUGAUGAG GCCGUUAGGC CGAA IUCCACUG | 3132 |
| 1967 | ACAGAAGC A AGGUGGCU | 944 | AGCCACCU CUGAUGAG GCCGUUAGGC CGAA ICUUCUGU | 3133 |
| 1975 | AAGGUGGC U UUGUAGUG | 945 | CACUACAA CUGAUGAG GCCGUUAGGC CGAA ICCACCUU | 3134 |
| 1987 | UAGUGGAC A AAAACACC | 946 | GGUGUUUU CUGAUGAG GCCGUUAGGC CGAA IUCCACUA | 3135 |
| 1993 | ACAAAAAC A CCAAAAUG | 947 | CAUUUUGG CUGAUGAG GCCGUUAGGC CGAA IUUUUUGU | 3136 |
| 1995 | AAAAACAC C AAAAUGGC | 948 | GCCAUUUU CUGAUGAG GCCGUUAGGC CGAA IUGUUUUU | 3137 |
| 1996 | AAAACACC A AAAUGGCC | 949 | GGCCAUUU CUGAUGAG GCCGUUAGGC CGAA IGUGUUUU | 3138 |
| 2004 | AAAAUGGC C UACCUCCA | 950 | UGGAGGUA CUGAUGAG GCCGUUAGGC CGAA ICCAUUUU | 3139 |
| 2005 | AAAUGGCC U ACCUCCAA | 951 | UUGGAGGU CUGAUGAG GCCGUUAGGC CGAA IGCCAUUU | 3140 |
| 2008 | UGGCCUAC C UCCAAAUC | 952 | GAUUUGGA CUGAUGAG GCCGUUAGGC CGAA IUAGGCCA | 3141 |
| 2009 | GGCCUACC U CCAAAUCC | 953 | GGAUUUGG CUGAUGAG GCCGUUAGGC CGAA IGUAGGCC | 3142 |
| 2011 | CCUACCUC C AAAUCCCA | 954 | UGGGAUUU CUGAUGAG GCCGUUAGGC CGAA IAGGUAGG | 3143 |
| 2012 | CUACCUCC A AAUCCCAG | 955 | CUGGGAUU CUGAUGAG GCCGUUAGGC CGAA IGAGGUAG | 3144 |
| 2017 | UCCAAAUC C CAGGCAUU | 956 | AAUGCCUG CUGAUGAG GCCGUUAGGC CGAA IAUUUGGA | 3145 |
| 2018 | CCAAAUCC C AGGCAUUG | 957 | CAAUGCCU CUGAUGAG GCCGUUAGGC CGAA IGAUUUGG | 3146 |
| 2019 | CAAAUCCC A GGCAUUGC | 958 | GCAAUGCC CUGAUGAG GCCGUUAGGC CGAA IGGAUUUG | 3147 |
| 2023 | UCCCAGGC A UUGCUAAG | 959 | CUUAGCAA CUGAUGAG GCCGUUAGGC CGAA ICCUGGGA | 3148 |
| 2028 | GGCAUUGC U AAGGUUGG | 960 | CCAACCUU CUGAUGAG GCCGUUAGGC CGAA ICAAUGCC | 3149 |
| 2038 | AGGUUGGC A CUUGGAAA | 961 | UUUCCAAG CUGAUGAG GCCGUUAGGC CGAA ICCAACCU | 3150 |
| 2040 | GUUGGCAC U UGGAAAUA | 962 | UAUUUCCA CUGAUGAG GCCGUUAGGC CGAA IUGCCAAC | 3151 |
| 2050 | GGAAAUAC A GUCUGCAA | 963 | UUGCAGAC CUGAUGAG GCCGUUAGGC CGAA IUAUUUCC | 3152 |
| 2054 | AUACAGUC U GCAAGCAA | 964 | UUGCUUGC CUGAUGAG GCCGUUAGGC CGAA IACUGUAU | 3153 |
| 2057 | CAGUCUGC A AGCAAGCU | 965 | AGCUUGCU CUGAUGAG GCCGUUAGGC CGAA ICAGACUG | 3154 |
| 2061 | CUGCAAGC A AGCUCACA | 966 | UGUGAGCU CUGAUGAG GCCGUUAGGC CGAA ICUUGCAG | 3155 |
| 2065 | AAGCAAGC U CACAAACC | 967 | GGUUUGUG CUGAUGAG GCCGUUAGGC CGAA ICUUGCUU | 3156 |
| 2067 | GCAAGCUC A CAAACCUU | 968 | AAGGUUUG CUGAUGAG GCCGUUAGGC CGAA IAGCUUGC | 3157 |
| 2069 | AAGCUCAC A AACCUUGA | 969 | UCAAGGUU CUGAUGAG GCCGUUAGGC CGAA IUGAGCUU | 3158 |
| 2073 | UCACAAAC C UUGACCCU | 970 | AGGGUCAA CUGAUGAG GCCGUUAGGC CGAA IUUUGUGA | 3159 |
| 2074 | CACAAACC U UGACCCUG | 971 | CAGGGUCA CUGAUGAG GCCGUUAGGC CGAA IGUUUGUG | 3160 |
| 2079 | ACCUUGAC C CUGACUGU | 972 | ACAGUCAG CUGAUGAG GCCGUUAGGC CGAA IUCAAGGU | 3161 |
| 2080 | CCUUGACC C UGACUGUC | 973 | GACAGUCA CUGAUGAG GCCGUUAGGC CGAA IGUCAAGG | 3162 |
| 2081 | CUUGACCC U GACUGUCA | 974 | UGACAGUC CUGAUGAG GCCGUUAGGC CGAA IGGUCAAG | 3163 |
| 2085 | ACCCUGAC U GUCACGUC | 975 | GACGUGAC CUGAUGAG GCCGUUAGGC CGAA IUCAGGGU | 3164 |
| 2089 | UGACUGUC A CGUCCCGU | 976 | ACGGGACG CUGAUGAG GCCGUUAGGC CGAA IACAGUCA | 3165 |
| 2094 | GUCACGUC C CGUGCGUC | 977 | GACGCACG CUGAUGAG GCCGUUAGGC CGAA IACGUGAC | 3166 |
| 2095 | UCACGUCC C GUGCGUCC | 978 | GGACGCAC CUGAUGAG GCCGUUAGGC CGAA IGACGUGA | 3167 |
| 2103 | CGUGCGUC C AAUGCUAC | 979 | GUAGCAUU CUGAUGAG GCCGUUAGGC CGAA IACGCACG | 3168 |
| 2104 | GUGCGUCC A AUGCUACC | 980 | GGUAGCAU CUGAUGAG GCCGUUAGGC CGAA IGACGCAC | 3169 |
| 2109 | UCCAAUGC U ACCCUGCC | 981 | GGCAGGGU CUGAUGAG GCCGUUAGGC CGAA ICAUUGGA | 3170 |
| 2112 | AAUGCUAC C CUGCCUCC | 982 | GGAGGCAG CUGAUGAG GCCGUUAGGC CGAA IUAGCAUU | 3171 |
| 2113 | AUGCUACC C UGCCUCCA | 983 | UGGAGGCA CUGAUGAG GCCGUUAGGC CGAA IGUAGCAU | 3172 |
| 2114 | UGCUACCC U GCCUCCAA | 984 | UUGGAGGC CUGAUGAG GCCGUUAGGC CGAA IGGUAGCA | 3173 |
| 2117 | UACCCUGC C UCCAAUUA | 985 | UAAUUGGA CUGAUGAG GCCGUUAGGC CGAA ICAGGGUA | 3174 |
| 2118 | ACCCUGCC U CCAAUUAC | 986 | GUAAUUGG CUGAUGAG GCCGUUAGGC CGAA IGCAGGGU | 3175 |
| 2120 | CCUGCCUC C AAUUACAG | 987 | CUGUAAUU CUGAUGAG GCCGUUAGGC CGAA IAGGCAGG | 3176 |
| 2121 | CUGCCUCC A AUUACAGU | 988 | ACUGUAAU CUGAUGAG GCCGUUAGGC CGAA IGAGGCAG | 3177 |
| 2127 | CCAAUUAC A GUGACUUC | 989 | GAAGUCAC CUGAUGAG GCCGUUAGGC CGAA IUAAUUGG | 3178 |
| 2133 | ACAGUGAC U UCCAAAAC | 990 | GUUUUGGA CUGAUGAG GCCGUUAGGC CGAA IUCACUGU | 3179 |
| 2136 | GUGACUUC C AAAACGAA | 991 | UUCGUUUU CUGAUGAG GCCGUUAGGC CGAA IAAGUCAC | 3180 |
| 2137 | UGACUUCC A AAACGAAC | 992 | GUUCGUUU CUGAUGAG GCCGUUAGGC CGAA IGAAGUCA | 3181 |
| 2146 | AAACGAAC A AGGACACC | 993 | GGUGUCCU CUGAUGAG GCCGUUAGGC CGAA IUUCGUUU | 3182 |
| 2152 | ACAAGGAC A CCAGCAAA | 994 | UUUGCUGG CUGAUGAG GCCGUUAGGC CGAA IUCCUUGU | 3183 |
| 2154 | AAGGACAC C AGCAAAUU | 995 | AAUUUGCU CUGAUGAG GCCGUUAGGC CGAA IUGUCCUU | 3184 |
| 2155 | AGGACACC A GCAAAUUC | 996 | GAAUUUGC CUGAUGAG GCCGUUAGGC CGAA IGUGUCCU | 3185 |
| 2158 | ACACCAGC A AAUUCCCC | 997 | GGGGAAUU CUGAUGAG GCCGUUAGGC CGAA ICUGGUGU | 3186 |
| 2164 | GCAAAUUC C CCAGCCCU | 998 | AGGGCUGG CUGAUGAG GCCGUUAGGC CGAA IAAUUUGC | 3187 |
| 2165 | CAAAUUCC C CAGCCCUC | 999 | GAGGGCUG CUGAUGAG GCCGUUAGGC CGAA IGAAUUUG | 3188 |
| 2166 | AAAUUCCC C AGCCCUCU | 1000 | AGAGGGCU CUGAUGAG GCCGUUAGGC CGAA IGGAAUUU | 3189 |
| 2167 | AAUUCCCC A GCCCUCUG | 1001 | CAGAGGGC CUGAUGAG GCCGUUAGGC CGAA IGGGAAUU | 3190 |
| 2170 | UCCCCAGC C CUCUGGUA | 1002 | UACCAGAG CUGAUGAG GCCGUUAGGC CGAA ICUGGGGA | 3191 |
| 2171 | CCCCAGCC C UCUGGUAG | 1003 | CUACCAGA CUGAUGAG GCCGUUAGGC CGAA IGCUGGGG | 3192 |
| 2172 | CCCAGCCC U CUGGUAGU | 1004 | ACUACCAG CUGAUGAG GCCGUUAGGC CGAA IGGCUGGG | 3193 |
| 2174 | CAGCCCUC U GGUAGUUU | 1005 | AAACUACC CUGAUGAG GCCGUUAGGC CGAA IAGGGCUG | 3194 |
| 2187 | GUUUAUGC A AAUAUUCG | 1006 | CGAAUAUU CUGAUGAG GCCGUUAGGC CGAA ICAUAAAC | 3195 |
| 2197 | AUAUUCGC C AAGGAGCC | 1007 | GGCUCCUU CUGAUGAG GCCGUUAGGC CGAA ICGAAUAU | 3196 |
| 2198 | UAUUCGCC A AGGAGCCU | 1008 | AGGCUCCU CUGAUGAG GCCGUUAGGC CGAA IGCGAAUA | 3197 |
| 2205 | CAAGGAGC C UCCCCAAU | 1009 | AUUGGGGA CUGAUGAG GCCGUUAGGC CGAA ICUCCUUG | 3198 |
| 2206 | AAGGAGCC U CCCCAAUU | 1010 | AAUUGGGG CUGAUGAG GCCGUUAGGC CGAA IGCUCCUU | 3199 |
| 2208 | GGAGCCUC C CCAAUUCU | 1011 | AGAAUUGG CUGAUGAG GCCGUUAGGC CGAA IAGGCUCC | 3200 |
| 2209 | GAGCCUCC C CAAUUCUC | 1012 | GAGAAUUG CUGAUGAG GCCGUUAGGC CGAA IGAGGCUC | 3201 |
| 2210 | AGCCUCCC C AAUUCUCA | 1013 | UGAGAAUU CUGAUGAG GCCGUUAGGC CGAA IGGAGGCU | 3202 |
| 2211 | GCCUCCCC A AUUCUCAG | 1014 | CUGAGAAU CUGAUGAG GCCGUUAGGC CGAA IGGGAGGC | 3203 |
| 2216 | CCCAAUUC U CAGGGCCA | 1015 | UGGCCCUG CUGAUGAG GCCGUUAGGC CGAA IAAUUGGG | 3204 |
| 2218 | CAAUUCUC A GGGCCAGU | 1016 | ACUGGCCC CUGAUGAG GCCGUUAGGC CGAA IAGAAUUG | 3205 |
| 2223 | CUCAGGGC C AGUGUCAC | 1017 | GUGACACU CUGAUGAG GCCGUUAGGC CGAA ICCCUGAG | 3206 |
| 2224 | UCAGGGCC A GUGUCACA | 1018 | UGUGACAC CUGAUGAG GCCGUUAGGC CGAA IGCCCUGA | 3207 |
| 2230 | CCAGUGUC A CAGCCCUG | 1019 | CAGGGCUG CUGAUGAG GCCGUUAGGC CGAA IACACUGG | 3208 |
| 2232 | AGUGUCAC A GCCCUGAU | 1020 | AUCAGGGC CUGAUGAG GCCGUUAGGC CGAA IUGACACU | 3209 |
| 2235 | GUCACAGC C CUGAUUGA | 1021 | UCAAUCAG CUGAUGAG GCCGUUAGGC CGAA ICUGUGAC | 3210 |
| 2236 | UCACAGCC C UGAUUGAA | 1022 | UUCAAUCA CUGAUGAG GCCGUUAGGC CGAA IGCUGUGA | 3211 |
| 2237 | CACAGCCC U GAUUGAAU | 1023 | AUUCAAUC CUGAUGAG GCCGUUAGGC CGAA IGGCUGUG | 3212 |
| 2247 | AUUGAAUC A GUGAAUGG | 1024 | CCAUUCAC CUGAUGAG GCCGUUAGGC CGAA IAUUCAAU | 3213 |
| 2262 | GGAAAAAC A GUUACCUU | 1025 | AAGGUAAC CUGAUGAG GCCGUUAGGC CGAA IUUUUUCC | 3214 |
| 2268 | ACAGUUAC C UUGGAACU | 1026 | AGUUCCAA CUGAUGAG GCCGUUAGGC CGAA IUAACUGU | 3215 |
| 2269 | CAGUUACC U UGGAACUA | 1027 | UAGUUCCA CUGAUGAG GCCGUUAGGC CGAA IGUAACUG | 3216 |
| 2276 | CUUGGAAC U ACUGGAUA | 1028 | UAUCCAGU CUGAUGAG GCCGUUAGGC CGAA IUUCCAAG | 3217 |
| 2279 | GGAACUAC U GGAUAAUG | 1029 | CAUUAUCC CUGAUGAG GCCGUUAGGC CGAA IUAGUUCC | 3218 |
| 2292 | AAUGGAGC A GGUGCUGA | 1030 | UCAGCACC CUGAUGAG GCCGUUAGGC CGAA ICUCCAUU | 3219 |
| 2298 | GCAGGUGC U GAUGCUAC | 1031 | GUAGCAUC CUGAUGAG GCCGUUAGGC CGAA ICACCUGC | 3220 |
| 2304 | GCUGAUGC U ACUAAGGA | 1032 | UCCUUAGU CUGAUGAG GCCGUUAGGC CGAA ICAUCAGC | 3221 |
| 2307 | GAUGCUAC U AAGGAUGA | 1033 | UCAUCCUU CUGAUGAG GCCGUUAGGC CGAA IUAGCAUC | 3222 |
| 2323 | ACGGUGUC U ACUCAAGG | 1034 | CCUUGAGU CUGAUGAG GCCGUUAGGC CGAA IACACCGU | 3223 |
| 2326 | GUGUCUAC U CAAGGUAU | 1035 | AUACCUUG CUGAUGAG GCCGUUAGGC CGAA IUAGACAC | 3224 |
| 2328 | GUCUACUC A AGGUAUUU | 1036 | AAAUACCU CUGAUGAG GCCGUUAGGC CGAA IAGUAGAC | 3225 |
| 2338 | GGUAUUUC A CAACUUAU | 1037 | AUAAGUUG CUGAUGAG GCCGUUAGGC CGAA IAAAUACC | 3226 |
| 2340 | UAUUUCAC A ACUUAUGA | 1038 | UCAUAAGU CUGAUGAG GCCGUUAGGC CGAA IUGAAAUA | 3227 |
| 2343 | UUCACAAC U UAUGACAC | 1039 | GUGUCAUA CUGAUGAG GCCGUUAGGC CGAA IUUGUGAA | 3228 |
| 2350 | CUUAUGAC A CGAAUGGU | 1040 | ACCAUUCG CUGAUGAG GCCGUUAGGC CGAA IUCAUAAG | 3229 |
| 2365 | GUAGAUAC A GUGUAAAA | 1041 | UUUUACAC CUGAUGAG GCCGUUAGGC CGAA IUAUCUAC | 3230 |
| 2382 | GUGCGGGC U CUGGGAGG | 1042 | CCUCCCAG CUGAUGAG GCCGUUAGGC CGAA ICCCGCAC | 3231 |
| 2384 | GCGGGCUC U GGGAGGAG | 1043 | CUCCUCCC CUGAUGAG GCCGUUAGGC CGAA IAGCCCGC | 3232 |
| 2400 | GUUAACGC A GCCAGACG | 1044 | CGUCUGGC CUGAUGAG GCCGUUAGGC CGAA ICGUUAAC | 3233 |
| 2403 | AACGCAGC C AGACGGAG | 1045 | CUCCGUCU CUGAUGAG GCCGUUAGGC CGAA ICUGCGUU | 3234 |
| 2404 | ACGCAGCC A GACGGAGA | 1046 | UCUCCGUC CUGAUGAG GCCGUUAGGC CGAA IGCUGCGU | 3235 |
| 2420 | AGUGAUAC C CCAGCAGA | 1047 | UCUGCUGG CUGAUGAG GCCGUUAGGC CGAA IUAUCACU | 3236 |
| 2421 | GUGAUACC C CAGCAGAG | 1048 | CUCUGCUG CUGAUGAG GCCGUUAGGC CGAA IGUAUCAC | 3237 |
| 2422 | UGAUACCC C AGCAGAGU | 1049 | ACUCUGCU CUGAUGAG GCCGUUAGGC CGAA IGGUAUCA | 3238 |
| 2423 | GAUACCCC A GCAGAGUG | 1050 | CACUCUGC CUGAUGAG GCCGUUAGGC CGAA IGGGUAUC | 3239 |
| 2426 | ACCCCAGC A GAGUGGAG | 1051 | CUCCACUC CUGAUGAG GCCGUUAGGC CGAA ICUGGGGU | 3240 |
| 2436 | AGUGGAGC A CUGUACAU | 1052 | AUGUACAG CUGAUGAG GCCGUUAGGC CGAA ICUCCACU | 3241 |
| 2438 | UGGAGCAC U GUACAUAC | 1053 | GUAUGUAC CUGAUGAG GCCGUUAGGC CGAA IUGCUCCA | 3242 |
| 2443 | CACUGUAC A UACCUGGC | 1054 | GCCAGGUA CUGAUGAG GCCGUUAGGC CGAA IUACAGUG | 3243 |
| 2447 | GUACAUAC C UGGCUGGA | 1055 | UCCAGCCA CUGAUGAG GCCGUUAGGC CGAA IUAUGUAC | 3244 |
| 2448 | UACAUACC U GGCUGGAU | 1056 | AUCCAGCC CUGAUGAG GCCGUUAGGC CGAA IGUAUGUA | 3245 |
| 2452 | UACCUGGC U GGAUUGAG | 1057 | CUCAAUCC CUGAUGAG GCCGUUAGGC CGAA ICCAGGUA | 3246 |
| 2474 | UGAAAUAC A AUGGAAUC | 1058 | GAUUCCAU CUGAUGAG GCCGUUAGGC CGAA IUAUUUCA | 3247 |
| 2483 | AUGGAAUC C ACCAAGAC | 1059 | GUCUUGGU CUGAUGAG GCCGUUAGGC CGAA IAUUCCAU | 3248 |
| 2484 | UGGAAUCC A CCAAGACC | 1060 | GGUCUUGG CUGAUGAG GCCGUUAGGC CGAA IGAUUCCA | 3249 |
| 2486 | GAAUCCAC C AAGACCUG | 1061 | CAGGUCUU CUGAUGAG GCCGUUAGGC CGAA IUGGAUUC | 3250 |
| 2487 | AAUCCACC A AGACCUGA | 1062 | UCAGGUCU CUGAUGAG GCCGUUAGGC CGAA IGUGGAUU | 3251 |
| 2492 | ACCAAGAC C UGAAAUUA | 1063 | UAAUUUCA CUGAUGAG GCCGUUAGGC CGAA IUCUUGGU | 3252 |
| 2493 | CCAAGACC U GAAAUUAA | 1064 | UUAAUUUC CUGAUGAG GCCGUUAGGC CGAA IGUCUUGG | 3253 |
| 2516 | UGAUGUUC A ACACAAGC | 1065 | GCUUGUGU CUGAUGAG GCCGUUAGGC CGAA IAACAUCA | 3254 |
| 2519 | UGUUCAAC A CAAGCAAG | 1066 | CUUGCUUG CUGAUGAG GCCGUUAGGC CGAA IUUGAACA | 3255 |
| 2521 | UUCAACAC A AGCAAGUG | 1067 | CACUUGCU CUGAUGAG GCCGUUAGGC CGAA IUGUUGAA | 3256 |
| 2525 | ACACAAGC A AGUGUGUU | 1068 | AACACACU CUGAUGAG GCCGUUAGGC CGAA ICUUGUGU | 3257 |
| 2536 | UGUGUUUC A GCAGAACA | 1069 | UGUUCUGC CUGAUGAG GCCGUUAGGC CGAA IAAACACA | 3258 |
| 2539 | GUUUCAGC A GAACAUCC | 1070 | GGAUGUUC CUGAUGAG GCCGUUAGGC CGAA ICUGAAAC | 3259 |
| 2544 | AGCAGAAC A UCCUCGGG | 1071 | CCCGAGGA CUGAUGAG GCCGUUAGGC CGAA IUUCUGCU | 3260 |
| 2547 | AGAACAUC C UCGGGAGG | 1072 | CCUCCCGA CUGAUGAG GCCGUUAGGC CGAA IAUGUUCU | 3261 |
| 2548 | GAACAUCC U CGGGAGGC | 1073 | GCCUCCCG CUGAUGAG GCCGUUAGGC CGAA IGAUGUUC | 3262 |
| 2557 | CGGGAGGC U CAUUUGUG | 1074 | CACAAAUG CUGAUGAG GCCGUUAGGC CGAA ICCUCCCG | 3263 |
| 2559 | GGAGGCUC A UUUGUGGC | 1075 | GCCACAAA CUGAUGAG GCCGUUAGGC CGAA IAGCCUCC | 3264 |
| 2568 | UUUGUGGC U UCUGAUGU | 1076 | ACAUCAGA CUGAUGAG GCCGUUAGGC CGAA ICCACAAA | 3265 |
| 2571 | GUGGCUUC U GAUGUCCC | 1077 | GGGACAUC CUGAUGAG GCCGUUAGGC CGAA IAAGCCAC | 3266 |
| 2578 | CUGAUGUC C CAAAUGCU | 1078 | AGCAUUUG CUGAUGAG GCCGUUAGGC CGAA IACAUCAG | 3267 |
| 2579 | UGAUGUCC C AAAUGCUC | 1079 | GAGCAUUU CUGAUGAG GCCGUUAGGC CGAA IGACAUCA | 3268 |
| 2580 | GAUGUCCC A AAUGCUCC | 1080 | GGAGCAUU CUGAUGAG GCCGUUAGGC CGAA IGGACAUC | 3269 |
| 2586 | CCAAAUGC U CCCAUACC | 1081 | GGUAUGGG CUGAUGAG GCCGUUAGGC CGAA ICAUUUGG | 3270 |
| 2588 | AAAUGCUC C CAUACCUG | 1082 | CAGGUAUG CUGAUGAG GCCGUUAGGC CGAA IAGCAUUU | 3271 |
| 2589 | AAUGCUCC C AUACCUGA | 1083 | UCAGGUAU CUGAUGAG GCCGUUAGGC CGAA IGAGCAUU | 3272 |
| 2590 | AUGCUCCC A UACCUGAU | 1084 | AUCAGGUA CUGAUGAG GCCGUUAGGC CGAA IGGAGCAU | 3273 |
| 2594 | UCCCAUAC C UGAUCUCU | 1085 | AGAGAUCA CUGAUGAG GCCGUUAGGC CGAA IUAUGGGA | 3274 |
| 2595 | CCCAUACC U GAUCUCUU | 1086 | AAGAGAUC CUGAUGAG GCCGUUAGGC CGAA IGUAUGGG | 3275 |
| 2600 | ACCUGAUC U CUUCCCAC | 1087 | GUGGGAAG CUGAUGAG GCCGUUAGGC CGAA IAUCAGGU | 3276 |
| 2602 | CUGAUCUC U UCCCACCU | 1088 | AGGUGGGA CUGAUGAG GCCGUUAGGC CGAA IAGAUCAG | 3277 |
| 2605 | AUCUCUUC C CACCUGGC | 1089 | GCCAGGUG CUGAUGAG GCCGUUAGGC CGAA IAAGAGAU | 3278 |
| 2606 | UCUCUUCC C ACCUGGCC | 1090 | GGCCAGGU CUGAUGAG GCCGUUAGGC CGAA IGAAGAGA | 3279 |
| 2607 | CUCUUCCC A CCUGGCCA | 1091 | UGGCCAGG CUGAUGAG GCCGUUAGGC CGAA IGGAAGAG | 3280 |
| 2609 | CUUCCCAC C UGGCCAAA | 1092 | UUUGGCCA CUGAUGAG GCCGUUAGGC CGAA IUGGGAAG | 3281 |
| 2610 | UUCCCACC U GGCCAAAU | 1093 | AUUUGGCC CUGAUGAG GCCGUUAGGC CGAA IGUGGGAA | 3282 |
| 2614 | CACCUGGC C AAAUCACC | 1094 | GGUGAUUU CUGAUGAG GCCGUUAGGC CGAA ICCAGGUG | 3283 |
| 2615 | ACCUGGCC A AAUCACCG | 1095 | CGGUGAUU CUGAUGAG GCCGUUAGGC CGAA IGCCAGGU | 3284 |
| 2620 | GCCAAAUC A CCGACCUG | 1096 | CAGGUCGG CUGAUGAG GCCGUUAGGC CGAA IAUUUGGC | 3285 |
| 2622 | CAAAUCAC C GACCUGAA | 1097 | UUCAGGUC CUGAUGAG GCCGUUAGGC CGAA IUGAUUUG | 3286 |
| 2626 | UCACCGAC C UGAAGGCG | 1098 | CGCCUUCA CUGAUGAG GCCGUUAGGC CGAA IUCGGUGA | 3287 |
| 2627 | CACCGACC U GAAGGCGG | 1099 | CCGCCUUC CUGAUGAG GCCGUUAGGC CGAA IGUCGGUG | 3288 |
| 2642 | GGAAAUUC A CGGGGGCA | 1100 | UGCCCCCG CUGAUGAG GCCGUUAGGC CGAA IAAUUUCC | 3289 |
| 2650 | ACGGGGGC A GUCUCAUU | 1101 | AAUGAGAC CUGAUGAG GCCGUUAGGC CGAA ICCCCCGU | 3290 |
| 2654 | GGGCAGUC U CAUUAAUC | 1102 | GAUUAAUG CUGAUGAG GCCGUUAGGC CGAA IACUGCCC | 3291 |
| 2656 | GCAGUCUC A UUAAUCUG | 1103 | CAGAUUAA CUGAUGAG GCCGUUAGGC CGAA IAGACUGC | 3292 |
| 2663 | CAUUAAUC U GACUUGGA | 1104 | UCCAAGUC CUGAUGAG GCCGUUAGGC CGAA IAUUAAUG | 3293 |
| 2667 | AAUCUGAC U UGGACAGC | 1105 | GCUGUCCA CUGAUGAG GCCGUUAGGC CGAA IUCAGAUU | 3294 |
| 2673 | ACUUGGAC A GCUCCUGG | 1106 | CCAGGAGC CUGAUGAG GCCGUUAGGC CGAA IUCCAAGU | 3295 |
| 2676 | UGGACAGC U CCUGGGGA | 1107 | UCCCCAGG CUGAUGAG GCCGUUAGGC CGAA ICUGUCCA | 3296 |
| 2678 | GACAGCUC C UGGGGAUG | 1108 | CAUCCCCA CUGAUGAG GCCGUUAGGC CGAA IAGCUGUC | 3297 |
| 2679 | ACAGCUCC U GGGGAUGA | 1109 | UCAUCCCC CUGAUGAG GCCGUUAGGC CGAA IGAGCUGU | 3298 |
| 2695 | AUUAUGAC C AUGGAACA | 1110 | UGUUCCAU CUGAUGAG GCCGUUAGGC CGAA IUCAUAAU | 3299 |
| 2696 | UUAUGACC A UGGAACAG | 1111 | CUGUUCCA CUGAUGAG GCCGUUAGGC CGAA IGUCAUAZ | 3300 |
| 2703 | CAUGGAAC A GCUCACAA | 1112 | UUGUGAGC CUGAUGAG GCCGUUAGGC CGAA IUUCCAUG | 3301 |
| 2706 | GGAACAGC U CACAAGUA | 1113 | UACUUGUG CUGAUGAG GCCGUUAGGC CGAA ICUGUUCC | 3302 |
| 2708 | AACAGCUC A CAAGUAUA | 1114 | UAUACUUG CUGAUGAG GCCGUUAGGC CGAA IAGCUGUU | 3303 |
| 2710 | CAGCUCAC A AGUAUAUC | 1115 | GAUAUACU CUGAUGAG GCCGUUAGGC CGAA IUGAGCUG | 3304 |
| 2719 | AGUAUAUC A UUCGAAUA | 1116 | UAUUCGAA CUGAUGAG GCCGUUAGGC CGAA IAUAUACU | 3305 |
| 2733 | AUAAGUAC A AGUAUUCU | 1117 | AGAAUACU CUGAUGAG GCCGUUAGGC CGAA IUACUUAU | 3306 |
| 2741 | AAGUAUUC U UGAUCUCA | 1118 | UGAGAUCA CUGAUGAG GCCGUUAGGC CGAA IAAUACUU | 3307 |
| 2747 | UCUUGAUC U CAGAGACA | 1119 | UGUCUCUG CUGAUGAG GCCGUUAGGC CGAA IAUCAAGA | 3308 |
| 2749 | UUGAUCUC A GAGACAAG | 1120 | CUUGUCUC CUGAUGAG GCCGUUAGGC CGAA IAGAUCAA | 3309 |
| 2755 | UCAGAGAC A AGUUCAAU | 1121 | AUUGAACU CUGAUGAG GCCGUUAGGC CGAA IUCUCUGA | 3310 |
| 2761 | ACAAGUUC A AUGAAUCU | 1122 | AGAUUCAU CUGAUGAG GCCGUUAGGC CGAA IAACUUGU | 3311 |
| 2769 | AAUGAAUC U CUUCAAGU | 1123 | ACUUGAAG CUGAUGAG GCCGUUAGGC CGAA IAUUCAUU | 3312 |
| 2771 | UGAAUCUC U UCAAGUGA | 1124 | UCACUUGA CUGAUGAG GCCGUUAGGC CGAA IAGAUUCA | 3313 |
| 2774 | AUCUCUUC A AGUGAAUA | 1125 | UAUUCACU CUGAUGAG GCCGUUAGGC CGAA IAAGAGAU | 3314 |
| 2784 | GUGAAUAC U ACUGCUCU | 1126 | AGAGCAGU CUGAUGAG GCCGUUAGGC CGAA IUAUUCAC | 3315 |
| 2787 | AAUACUAC U GCUCUCAU | 1127 | AUGAGAGC CUGAUGAG GCCGUUAGGC CGAA IUAGUAUU | 3316 |
| 2790 | ACUACUGC U CUCAUCCC | 1128 | GGGAUGAG CUGAUGAG GCCGUUAGGC CGAA ICAGUAGU | 3317 |
| 2792 | UACUGCUC U CAUCCCAA | 1129 | UUGGGAUG CUGAUGAG GCCGUUAGGC CGAA IAGCAGUA | 3318 |
| 2794 | CUGCUCUC A UCCCAAAG | 1130 | CUUUGGGA CUGAUGAG GCCGUUAGGC CGAA IAGAGCAG | 3319 |
| 2797 | CUCUCAUC C CAAAGGAA | 1131 | UUCCUUUG CUGAUGAG GCCGUUAGGC CGAA IAUGAGAG | 3320 |
| 2798 | UCUCAUCC C AAAGGAAG | 1132 | CUUCCUUU CUGAUGAG GCCGUUAGGC CGAA IGAUGAGA | 3321 |
| 2799 | CUCAUCCC A AAGGAAGC | 1133 | GCUUCCUU CUGAUGAG GCCGUUAGGC CGAA IGGAUGAG | 3322 |
| 2808 | AAGGAAGC C AACUCUGA | 1134 | UCAGAGUU CUGAUGAG GCCGUUAGGC CGAA ICUUCCUU | 3323 |
| 2809 | AGGAAGCC A ACUCUGAG | 1135 | CUCAGAGU CUGAUGAG GCCGUUAGGC CGAA IGCUUCCU | 3324 |
| 2812 | AAGCCAAC U CUGAGGAA | 1136 | UUCCUCAG CUGAUGAG GCCGUUAGGC CGAA IUUGGCUU | 3325 |
| 2814 | GCCAACUC U GAGGAAGU | 1137 | ACUUCCUC CUGAUGAG GCCGUUAGGC CGAA IAGUUGGC | 3326 |
| 2824 | AGGAAGUC U UUUUGUUU | 1138 | AAACAAAA CUGAUGAG GCCGUUAGGC CGAA IACUUCCU | 3327 |
| 2837 | GUUUAAAC C AGAAAACA | 1139 | UGUUUUCU CUGAUGAG GCCGUUAGGC CGAA IUUUAAAC | 3328 |
| 2838 | UUUAAACC A GAAAACAU | 1140 | AUGUUUUC CUGAUGAG GCCGUUAGGC CGAA IGUUUAAA | 3329 |
| 2845 | CAGAAAAC A UUACUUUU | 1141 | AAAAGUAA CUGAUGAG GCCGUUAGGC CGAA IUUUUCUG | 3330 |
| 2850 | AACAUUAC U UUUGAAAA | 1142 | UUUUCAAA CUGAUGAG GCCGUUAGGC CGAA IUAAUGUU | 3331 |
| 2863 | AAAAUGGC A CAGAUCUU | 1143 | AAGAUCUG CUGAUGAG GCCGUUAGGC CGAA ICCAUUUU | 3332 |
| 2865 | AAUGGCAC A GAUCUUUU | 1144 | AAAAGAUC CUGAUGAG GCCGUUAGGC CGAA IUGCCAUU | 3333 |
| 2870 | CACAGAUC U UUUCAUUG | 1145 | CAAUGAAA CUGAUGAG GCCGUUAGGC CGAA IAUCUGUG | 3334 |
| 2875 | AUCUUUUC A UUGCUAUU | 1146 | AAUAGCAA CUGAUGAG GCCGUUAGGC CGAA IAAAAGAU | 3335 |
| 2880 | UUCAUUGC U AUUCAGGC | 1147 | GCCUGAZU CUGAUGAG GCCGUUAGGC CGAA ICAAUGAA | 3336 |
| 2885 | UGCUAUUC A GGCUGUUG | 1148 | CAACAGCC CUGAUGAG GCCGUUAGGC CGAA IAAUAGCA | 3337 |
| 2889 | AUUCAGGC U GUUGAUAA | 1149 | UUAUCAAC CUGAUGAG GCCGUUAGGC CGAA ICCUGAAU | 3338 |
| 2906 | GGUCGAUC U GAAAUCAG | 1150 | CUGAUUUC CUGAUGAG GCCGUUAGGC CGAA IAUCGACC | 3339 |
| 2913 | CUGAAAUC A GAAAUAUC | 1151 | GAUAUUUC CUGAUGAG GCCGUUAGGC CGAA IAUUUCAG | 3340 |
| 2922 | GAAAUAUC C AACAUUGC | 1152 | GCAAUGUU CUGAUGAG GCCGUUAGGC CGAA IAUAUUUC | 3341 |
| 2923 | AAAUAUCC A ACAUUGCA | 1153 | UGCAAUGU CUGAUGAG GCCGUUAGGC CGAA IGAUAUUU | 3342 |
| 2926 | UAUCCAAC A UUGCACGA | 1154 | UCGUGCAA CUGAUGAG GCCGUUAGGC CGAA IUUGGAUA | 3343 |
| 2931 | AACAUUGC A CGAGUAUC | 1155 | GAUACUCG CUGAUGAG GCCGUUAGGC CGAA ICAAUGUU | 3344 |
| 2940 | CGAGUAUC U UUGUUUAU | 1156 | AUAAACAA CUGAUGAG GCCGUUAGGC CGAA IAUACUCG | 3345 |
| 2951 | GUUUAUUC C UCCACAGA | 1157 | UCUGUGGA CUGAUGAG GCCGUUAGGC CGAA IAAUAAAC | 3346 |
| 2952 | UUUAUUCC U CCACAGAC | 1158 | GUCUGUGG CUGAUGAG GCCGUUAGGC CGAA IGAAUAAA | 3347 |
| 2954 | UAUUCCUC C ACAGACUC | 1159 | GAGUCUGU CUGAUGAG GCCGUUAGGC CGAA IAGGAAUA | 3348 |
| 2955 | AUUCCUCC A CAGACUCC | 1160 | OGAGUCUG CUGAUGAG GCCGUUAGGC CGAA IGAGGAAU | 3349 |
| 2957 | UCCUCCAC A GACUCCGC | 1161 | GCGGAGUC CUGAUGAG GCCGUUAGGC CGAA IUGGAGGA | 3350 |
| 2961 | CCACAGAC U CCGCCAGA | 1162 | UCUGGCGG CUGAUGAG GCCGUUAGGC CGAA IUCUGUGG | 3351 |
| 2963 | ACAGACUC C GCCAGAGA | 1163 | UCUCUGGC CUGAUGAG GCCGUUAGGC CGAA IAGUCUGU | 3352 |
| 2966 | GACUCCGC C AGAGACAC | 1164 | GUGUCUCU CUGAUGAG GCCGUUAGGC CGAA ICGGAGUC | 3353 |
| 2967 | ACUCCGCC A GAGACACC | 1165 | GGUGUCUC CUGAUGAG GCCGUUAGGC CGAA IGCGGAGU | 3354 |
| 2973 | CCAGAGAC A CCUAGUCC | 1166 | GGACUAGG CUGAUGAG GCCGUUAGGC CGAA IUCUCUGG | 3355 |
| 2975 | AGAGACAC C UAGUCCUG | 1167 | CAGGACUA CUGAUGAG GCCGUUAGGC CGAA IUGUCUCU | 3356 |
| 2976 | GAGACACC U AGUCCUGA | 1168 | UCAGGACU CUGAUGAG GCCGUUAGGC CGAA IGUGUCUC | 3357 |
| 2981 | ACCUAGUC C UGAUGAAA | 1169 | UUUCAUCA CUGAUGAG GCCGUUAGGC CGAA IACUAGGU | 3358 |
| 2982 | CCUAGUCC U GAUGAAAC | 1170 | GUUUCAUC CUGAUGAG GCCGUUAGGC CGAA IGACUAGG | 3359 |
| 2994 | GAAACGUC U GCUCCUUG | 1171 | CAAGGAGC CUGAUGAG GCCGUUAGGC CGAA IACGUUUC | 3360 |
| 2997 | ACGUCUGC U CCUUGUCC | 1172 | GGACAAGG CUGAUGAG GCCGUUAGGC CGAA ICAGACGU | 3361 |
| 2999 | GUCUGCUC C UUGUCCUA | 1173 | UAGGACAA CUGAUGAG GCCGUUAGGC CGAA IAGCAGAC | 3362 |
| 3000 | UCUGCUCC U UGUCCUAA | 1174 | UUAGGACA CUGAUGAG GCCGUUAGGC CGAA IGAGCAGA | 3363 |
| 3005 | UCCUUGUC C UAAUAUUC | 1175 | GAAUAUUA CUGAUGAG GCCGUUAGGC CGAA IACAAGGA | 3364 |
| 3006 | CCUUGUCC U AAUAUUCA | 1176 | UGAAUAUU CUGAUGAG GCCGUUAGGC CGAA IGACAAGG | 3365 |
| 3014 | UAAUAUUC A UAUCAACA | 1177 | UGUUGAUA CUGAUGAG GCCGUUAGGC CGAA IAAUAUUA | 3366 |
| 3019 | UUCAUAUC A ACAGCACC | 1178 | GGUGCUGU CUGAUGAG GCCGUUAGGC CGAA IAUAUGAA | 3367 |
| 3022 | AUAUCAAC A GCACCAUU | 1179 | AAUGGUGC CUGAUGAG GCCGUUAGGC CGAA IUUGAUAU | 3368 |
| 3025 | UCAACAGC A CCAUUCCU | 1180 | AGGAAUGG CUGAUGAG GCCGUUAGGC CGAA ICUGUUGA | 3369 |
| 3027 | AACAGCAC C AUUCCUGG | 1181 | CCAGGAAU CUGAUGAG GCCGUUAGGC CGAA IUGCUGUU | 3370 |
| 3028 | ACAGCACC A UUCCUGGC | 1182 | GCCAGGAA CUGAUGAG GCCGUUAGGC CGAA IGUGCUGU | 3371 |
| 3032 | CACCAUUC C UGGCAUUC | 1183 | GAAUGCCA CUGAUGAG GCCGUUAGGC CGAA IAAUGGUG | 3372 |
| 3033 | ACCAUUCC U GGCAUUCA | 1184 | UGAAUGCC CUGAUGAG GCCGUUAGGC CGAA IGAAUGGU | 3373 |
| 3037 | UUCCUGGC A UUCACAUU | 1185 | AAUGUGAA CUGAUGAG GCCGUUAGGC CGAA ICCAGGAA | 3374 |
| 3041 | UGGCAUUC A CAUUUUAA | 1186 | UUAAAAUG CUGAUGAG GCCGUUAGGC CGAA IAAUGCCA | 3375 |
| 3043 | GCAUUCAC A UUUUAAAA | 1187 | UUUUAAAA CUGAUGAG GCCGUUAGGC CGAA IUGAAUGC | 3376 |
| 3077 | AGGAGAAC U GCAGCUGU | 1188 | ACAGCUGC CUGAUGAG GCCGUUAGGC CGAA IUUCUCCU | 3377 |
| 3080 | AGAACUGC A GCUGUCAA | 1189 | UUGACAGC CUGAUGAG GCCGUUAGGC CGAA ICAGUUCU | 3378 |
| 3083 | ACUGCAGC U GUCAAUAG | 1190 | CUAUUGAC CUGAUGAG GCCGUUAGGC CGAA ICUGCAGU | 3379 |
| 3087 | CAGCUGUC A AUAGCCUA | 1191 | UAGGCUAU CUGAUGAG GCCGUUAGGC CGAA IACAGCUG | 3380 |
| 3093 | UCAAUAGC C UAGGGCUG | 1192 | CAGCCCUA CUGAUGAG GCCGUUAGGC CGAA ICUAUUGA | 3381 |
| 3094 | CAAUAGCC U AGGGCUGA | 1193 | UCAGCCCU CUGAUGAG GCCGUUAGGC CGAA IGCUAUUG | 3382 |
| 3100 | CCUAGGGC U GAAUUUUU | 1194 | AAAAAUUC CUGAUGAG GCCGUUAGGC CGAA ICCCUAGG | 3383 |
| 3112 | UUUUUGUC A GAUAAAUA | 1195 | UAUUUAUC CUGAUGAG GCCGUUAGGC CGAA IACAAAAA | 3384 |
| 3130 | AAUAAAUC A UUCAUCCU | 1196 | AGGAUGAA CUGAUGAG GCCGUUAGGC CGAA IAUUUAUU | 3385 |
| 3134 | AAUCAUUC A UCCUUUUU | 1197 | AAAAAGGA CUGAUGAG GCCGUUAGGC CGAA IAAUGAUU | 3386 |
| 3137 | CAUUCAUC C UUUUUUUG | 1198 | CAAAAAAA CUGAUGAG GCCGUUAGGC CGAA IAUGAAUG | 3387 |
| 3138 | AUUCAUCC U UUUUUUGA | 1199 | UCAAAAAA CUGAUGAG GCCGUUAGGC CGAA IGAUGAAU | 3388 |
| 3160 | AAAUUUUC U AAAAUGUA | 1200 | UACAUUUU CUGAUGAG GCCGUUAGGC CGAA IAAAAUUU | 3389 |
| 3177 | UUUUAGAC U UCCUGUAG | 1201 | CUACAGGA CUGAUGAG GCCGUUAGGC CGAA IUCUAAAA | 3390 |
| 3267 | UUUUAGAC U UCCUGUAG | 1201 | CUACAGGA CUGAUGAG GCCGUUAGGC CGAA IUCUAAAA | 3390 |
| 3180 | UAGACUUC C UGUAGGGG | 1202 | CCCCUACA CUGAUGAG GCCGUUAGGC CGAA IAAGUCUA | 3391 |
| 3270 | UAGACUUC C UGUAGGGG | 1202 | CCCCUACA CUGAUGAG GCCGUUAGGC CGAA IAAGUCUA | 3391 |
| 3181 | AGACUUCC U GUAGGGGG | 1203 | CCCCCUAC CUGAUGAG GCCGUUAGGC CGAA IGAAGUCU | 3392 |
| 3271 | AGACUUCC U GUAGGGGG | 1203 | CCCCCUAC CUGAUGAG GCCGUUAGGC CGAA IGAAGUCU | 3392 |
| 3198 | CGAUAUAC U AAAUGUAU | 1204 | AUACAUUU CUGAUGAG GCCGUUAGGC CGAA IUAUAUCG | 3393 |
| 3251 | CGAUAUAC U AAAUGUAU | 1204 | AUACAUUU CUGAUGAG GCCGUUAGGC CGAA IUAUAUCG | 3393 |
| 3214 | UAUAGUAC A UUUAUACU | 1205 | AGUAUAAA CUGAUGAG GCCGUUAGGC CGAA IUACUAUA | 3394 |
| 3222 | AUUUAUAC U AAAUGUAU | 1206 | AUACAUUU CUGAUGAG GCCGUUAGGC CGAA IUAUAAAU | 3395 |
| 3233 | AUGUAUUC C UGUAGGGG | 1207 | CCCCUACA CUGAUGAG GCCGUUAGGC CGAA IAAUACAU | 3396 |
| 3234 | UGUAUUCC U GUAGGGGG | 1208 | CCCCCUAC CUGAUGAG GCCGUUAGGC CGAA IGAAUACA | 3397 |
| 3296 | UAAAAUGC U AAACAACU | 1209 | AGUUGUUU CUGAUGAG GCCGUUAGGC CGAA ICAUUUUA | 3398 |
| 3301 | UGCUAAAC A ACUGGGUA | 1210 | UACCCAGU CUGAUGAG GCCGUUAGGC CGAA IUUUAGCA | 3399 |

Input Sequence = NM_001285. Cut Site = CH/.
Arm Length = 8. Core Sequence = CUGAUGAG GCCGUUAGGC CGAA
Underlined region can be any X sequence or linker, as described herein.
NM_001285 (Homo sapiens chloride channel, calcium activated, 1 (CLCA1) mRNA, 3311 bp)

[0192] TABLE V
Human CLCA1 G-cleaver Ribozyme and Target Sequence

| | | Seq ID | | Rz Seq |
|---|---|---|---|---|
| Pos | Substrate | No. | Ribozyme | ID No. |
| 40 | AUAUAAUU G AAUAUUUU | 1211 | AAAAUAUU UGAUG GCAUGCACUAUGC GCG AAUUAUAU | 3400 |
| 67 | GGGAGCAU G AAGAGGUG | 1212 | CACCUCUU UGAUG GCAUGCACUAUGC GCG AUGCUCCC | 3401 |
| 78 | GAGGUGUU G AGGUUAUG | 1213 | CAUAACCU UGAUG GCAUGCACUAUGC GCG AACACCUC | 3402 |
| 106 | GCACAGCU G AAGGCAGA | 1214 | UCUGCCUU UGAUG GCAUGCACUAUGC GCG AGCUGUGC | 3403 |
| 134 | ACAAGUAC G CAAUUUGA | 1215 | UCAAAUUG UGAUG GCAUGCACUAUGC GCG GUACUUGU | 3404 |
| 141 | CGCAAUUU G AGACUAAG | 1216 | CUUAGUCU UGAUG GCAUGCACUAUGC GCG AAAUUGCG | 3405 |
| 172 | CUCCUAUU G AAGACAAG | 1217 | CUUGUCUU UGAUG GCAUGCACUAUGC GCG AAUAGGAG | 3406 |
| 223 | AGACCUGU G AUAAACCA | 1218 | UGGUUUAU UGAUG GCAUGCACUAUGC GCG ACAGGUCU | 3407 |
| 237 | CCACUUCC G AUAAGUUG | 1219 | CAACUUAU UGAUG GCAUGCACUAUGC GCG GGAAGUGG | 3408 |
| 312 | CGUAACCC G CAUUUUCC | 1220 | GGAAAAUG UGAUG GCAUGCACUAUGC GCG GGGUUACG | 3409 |
| 384 | UUCAUCUU G AUUCUUCA | 1221 | UGAAGAAU UGAUG GCAUGCACUAUGC GCG AAGAUGAA | 3410 |
| 411 | GGGGCCCU G AGUAAUUC | 1222 | GAAUUACU UGAUG GCAUGCACUAUGC GCG AGGGCCCC | 3411 |
| 432 | AUUCAGCU G AACAACAA | 1223 | UUGUUGUU UGAUG GCAUGCACUAUGC GCG AGCUGAAU | 3412 |
| 448 | AUGGCUAU G AAGGCAUU | 1224 | AAUGCCUU UGAUG GCAUGCACUAUGC GCG AUAGCCAU | 3413 |
| 463 | UUGUCGUU G CAAUCGAC | 1225 | GUCGAUUG UGAUG GCAUGCACUAUGC GCG AACGACAA | 3414 |
| 469 | UUGCAAUC G ACCCCAAU | 1226 | AUUGGGGU UGAUG GCAUGCACUAUGC GCG GAUUGCAA | 3415 |
| 480 | CCCAAUGU G CCAGAAGA | 1227 | UCUUCUGG UGAUG GCAUGCACUAUGC GCG ACAUUGGG | 3416 |
| 490 | CAGAAGAU G AAACACUC | 1228 | GAGUGUUU UGAUG GCAUGCACUAUGC GCG AUCUUCUG | 3417 |
| 522 | GACAUGGU G ACCCAGGC | 1229 | GCCUGGGU UGAUG GCAUGCACUAUGC GCG ACCAUGUC | 3418 |
| 547 | AUCUGUUU G AAGCUACA | 1230 | UGUAGCUU UGAUG GCAUGCACUAUGC GCG AAACAGAU | 3419 |
| 563 | AGGAAAGC G AUUUUAUU | 1231 | AAUAAAAU UGAUG GCAUGCACUAUGC GCG GCUUUCCU | 3420 |
| 583 | AAAAUGUU G CCAUUUUG | 1232 | CAAAAUGG UGAUG GCAUGCACUAUGC GCG AACAUUUU | 3421 |
| 591 | GCCAUUUU G AUUCCUGA | 1233 | UCAGGAAU UGAUG GCAUGCACUAUGC GCG AAAAUGGC | 3422 |
| 598 | UGAUUCCU G AAACAUGG | 1234 | CCAUGUUU UGAUG GCAUGCACUAUGC GCG AGGAAUCA | 3423 |
| 619 | CAAAGGCU G ACUAUGUG | 1235 | CACAUAGU UGAUG GCAUGCACUAUGC GCG AGCCUUUG | 3424 |
| 627 | GACUAUGU G AGACCAAA | 1236 | UUUGGUCU UGAUG GCAUGCACUAUGC GCG ACAUAGUC | 3425 |
| 640 | CAAAACUU G AGACCUAC | 1237 | GUAGGUCU UGAUG GCAUGCACUAUGC GCG AAGUUUUG | 3426 |
| 655 | ACAAAAAU G CUGAUGUU | 1238 | AACAUCAG UGAUG GCAUGCACUAUGC GCG AUUUUUGU | 3427 |
| 658 | AAAAUGCU G AUGUUCUG | 1239 | CAGAACAU UGAUG GCAUGCACUAUGC GCG AGCAUUUU | 3428 |
| 670 | UUCUGGUU G CUGAGUCU | 1240 | AGACUCAG UGAUG GCAUGCACUAUGC GCG AACCAGAA | 3429 |
| 673 | UGGUUGCU G AGUCUACU | 1241 | AGUAGACU UGAUG GCAUGCACUAUGC GCG AGCAACCA | 3430 |
| 694 | CAGGUAAU G AUGAACCC | 1242 | GGGUUCAU UGAUG GCAUGCACUAUGC GCG AUUACCUG | 3431 |
| 697 | GUAAUGAU G AACCCUAC | 1243 | GUAGGGUU UGAUG GCAUGCACUAUGC GCG AUCAUUAC | 3432 |
| 709 | CCUACACU G AGCAGAUG | 1244 | CAUCUGCU UGAUG GCAUGCACUAUGC GCG AGUGUAGG | 3433 |
| 739 | AGAAGGGU G AAAGGAUC | 1245 | GAUCCUUU UGAUG GCAUGCACUAUGC GCG ACCCUUCU | 3434 |
| 760 | UCACUCCU G AUUUCAUU | 1246 | AAUGAAAU UGAUG GCAUGCACUAUGC GCG AGGAGUGA | 3435 |
| 769 | AUUUCAUU G CAGGAAAA | 1247 | UUUUCCUG UGAUG GCAUGCACUAUGC GCG AAUGAAAU | 3436 |
| 787 | AGUUAGCU G AAUAUGGA | 1248 | UCCAUAUU UGAUG GCAUGCACUAUGC GCG AGCUAACU | 3437 |
| 820 | UUGUCCAU G AGUGGGCU | 1249 | AGCCCACU UGAUG GCAUGCACUAUGC GCG AUGGACAA | 3438 |
| 836 | UCAUCUAC G AUGGGGAG | 1250 | CUCCCCAU UGAUG GCAUGCACUAUGC GCG GUAGAUGA | 3439 |
| 850 | GAGUAUUU G ACGAGUAC | 1251 | GUACUCGU UGAUG GCAUGCACUAUGC GCG AAAUACUC | 3440 |
| 853 | UAUUUGAC G AGUACAAU | 1252 | AUUGUACU UGAUG GCAUGCACUAUGC GCG GUCAAAUA | 3441 |
| 865 | ACAAUAAU G AUGAGAAA | 1253 | UUUCUCAU UGAUG GCAUGCACUAUGC GCG AUUAUUGU | 3442 |
| 868 | AUAAUGAU G AGAAAUUC | 1254 | GAAUUUCU UGAUG GCAUGCACUAUGC GCG AUCAUUAU | 3443 |
| 980 | CAAAAGAU G CACAUUCA | 1255 | UGAAUGUG UGAUG GCAUGCACUAUGC GCG AUCUUUUG | 3444 |
| 1009 | GACUCUAU G AAAAAGGA | 1256 | UCCUUUUU UGAUG GCAUGCACUAUGC GCG AUAGAGUC | 3445 |
| 1021 | AAGGAUGU G AGUUUGUU | 1257 | AACAAACU UGAUG GCAUGCACUAUGC GCG ACAUCCUU | 3446 |
| 1040 | CCAAUCCC G CCAGACGG | 1258 | CCGUCUGG UGAUG GCAUGCACUAUGC GCG GGGAUUGG | 3447 |
| 1069 | UAAUGUUU G CACAACAU | 1259 | AUGUUGUG UGAUG GCAUGCACUAUGC GCG AAACAUUA | 3448 |
| 1081 | AACAUGUU G AUUCUAUA | 1260 | UAUAGAAU UGAUG GCAUGCACUAUGC GCG AACAUGUU | 3449 |
| 1093 | CUAUAGUU G AAUUCUGU | 1261 | ACAGAAUU UGAUG GCAUGCACUAUGC GCG AACUAUAG | 3450 |
| 1151 | UCAAAAAU G CAAUCUCC | 1262 | GGAGAUUG UGAUG GCAUGCACUAUGC GCG AUUUUUGA | 3451 |
| 1160 | CAAUCUCC G AAGCACAU | 1263 | AUGUGCUU UGAUG GCAUGCACUAUGC GCG GGAGAUUG | 3452 |
| 1176 | UGGGAAGU G AUCCGUGA | 1264 | UCACGGAU UGAUG GCAUGCACUAUGC GCG ACUUCCCA | 3453 |
| 1183 | UGAUCCGU G AUUCUGAG | 1265 | CUCAGAAU UGAUG GCAUGCACUAUGC GCG ACGGAUCA | 3454 |
| 1189 | GUGAUUCU G AGGACUUU | 1266 | AAAGUCCU UGAUG GCAUGCACUAUGC GCG AGAAUCAC | 3455 |
| 1215 | ACUCCUAU G ACAACACA | 1267 | UGUGUUGU UGAUG GCAUGCACUAUGC GCG AUAGGAGU | 3456 |
| 1248 | UUCUCAUU G CUGCAGAU | 1268 | AUCUGCAG UGAUG GCAUGCACUAUGC GCG AAUGAGAA | 3457 |
| 1251 | UCAUUGCU G CAGAUUGG | 1269 | CCAAUCUG UGAUG GCAUGCACUAUGC GCG AGCAAUGA | 3458 |
| 1285 | UAGUCCUU G ACAAAUCU | 1270 | AGAUUUGU UGAUG GCAUGCACUAUGC GCG AAGGACUA | 3459 |
| 1305 | AGCAUGGC G ACUGGUAA | 1271 | UUACCAGU UGAUG GCAUGCACUAUGC GCG GCCAUGCU | 3460 |
| 1316 | UGGUAACC G CCUCAAUC | 1272 | GAUUGAGG UGAUG GCAUGCACUAUGC GCG GGUUACCA | 3461 |
| 1325 | CCUCAAUC G ACUGAAUC | 1273 | GAUUCAGU UGAUG GCAUGCACUAUGC GCG GAUUGAGG | 3462 |
| 1329 | AAUCGACU G AAUCAAGC | 1274 | GCUUGAUU UGAUG GCAUGCACUAUGC GCG AGUCGAUU | 3463 |
| 1353 | CUUUUCCU G CUGCAGAC | 1275 | GUCUGCAG UGAUG GCAUGCACUAUGC GCG AGGAAAAG | 3464 |
| 1356 | UUCCUGCU G CAGACAGU | 1276 | ACUGUCUG UGAUG GCAUGCACUAUGC GCG AGCAGGAA | 3465 |
| 1366 | AGACAGUU G AGCUGGGG | 1277 | CCCCAGCU UGAUG GCAUGCACUAUGC GCG AACUGUCU | 3466 |
| 1392 | GGGAUGGU G ACAUUUGA | 1278 | UCAAAUGU UGAUG GCAUGCACUAUGC GCG ACCAUCCC | 3467 |
| 1399 | UGACAUUU G ACAGUGCU | 1279 | AGCACUGU UGAUG GCAUGCACUAUGC GCG AAAUGUCA | 3468 |
| 1405 | UUGACAGU G CUGCCCAU | 1280 | AUGGGCAG UGAUG GCAUGCACUAUGC GCG ACUGUCAA | 3469 |
| 1408 | ACAGUGCU G CCCAUGUA | 1281 | UACAUGGG UGAUG GCAUGCACUAUGC GCG AGCACUGU | 3470 |
| 1423 | UACAAAGU G AACUCAUA | 1282 | UAUGAGUU UGAUG GCAUGCACUAUGC GCG ACUUUGUA | 3471 |
| 1450 | GUGGCAGU G ACAGGGAC | 1283 | GUCCCUGU UGAUG GCAUGCACUAUGC GCG ACUGCCAC | 3472 |
| 1465 | ACACACUC G CCAAAAGA | 1284 | UCUUUUGG UGAUG GCAUGCACUAUGC GCG GAGUGUGU | 3473 |
| 1480 | GAUUACCU G CAGCAGCU | 1285 | AGCUGCUG UGAUG GCAUGCACUAUGC GCG AGGUAAUC | 3474 |
| 1508 | GUCCAUCU G CAGCGGGC | 1286 | GCCCGCUG UGAUG GCAUGCACUAUGC GCG AGAUGGAC | 3475 |
| 1520 | CGGGCUUC G AUCGGCAU | 1287 | AUGCCGAU UGAUG GCAUGCACUAUGC GCG GAAGCCCG | 3476 |
| 1536 | UUUACUGU G AUUAGGAA | 1288 | UUCCUAAU UGAUG GCAUGCACUAUGC GCG ACAGUAAA | 3477 |
| 1558 | AUCCAACU G AUGGAUCU | 1289 | AGAUCCAU UGAUG GCAUGCACUAUGC GCG AGUUGGAU | 3478 |
| 1567 | AUGGAUCU G AAAUUGUG | 1290 | CACAAUUU UGAUG GCAUGCACUAUGC GCG AGAUCCAU | 3479 |
| 1575 | GAAAUUGU G CUGCUGAC | 1291 | GUCAGCAG UGAUG GCAUGCACUAUGC GCG ACAAUUUC | 3480 |
| 1578 | AUUGUGCU G CUGACGGA | 1292 | UCCGUCAG UGAUG GCAUGCACUAUGC GCG AGCACAAU | 3481 |
| 1581 | GUGCUGCU G ACGGAUGG | 1293 | CCAUCCGU UGAUG GCAUGCACUAUGC GCG AGCAGCAC | 3482 |
| 1613 | AAGUGGGU G CUUUAACG | 1294 | CGUUAAAG UGAUG GCAUGCACUAUGC GCG ACCCACUU | 3483 |
| 1621 | GCUUUAAC G AGGUCAAA | 1295 | UUUGACCU UGAUG GCAUGCACUAUGC GCG GUUAAAGC | 3484 |
| 1639 | AAAGUGGU G CCAUCAUC | 1296 | GAUGAUGG UGAUG GCAUGCACUAUGC GCG ACCACUUU | 3485 |
| 1657 | ACACAGUC G CUUUGGGG | 1297 | CCCCAAAG UGAUG GCAUGCACUAUGC GCG GACUGUGU | 3486 |
| 1672 | GGCCCUCU G CAGCUCAA | 1298 | UUGAGCUG UGAUG GCAUGCACUAUGC GCG AGAGGGCC | 3487 |
| 1704 | UCCAAAAU G ACAGGAGG | 1299 | CCUCCUGU UGAUG GCAUGCACUAUGC GCG AUUUUGGA | 3488 |
| 1726 | AGACAUAU G CUUCAGAU | 1300 | AUCUGAAG UGAUG GCAUGCACUAUGC GCG AUAUGUCU | 3489 |
| 1759 | GCCUCAUU G AUGCUUUU | 1301 | AAAAGCAU UGAUG GCAUGCACUAUGC GCG AAUGAGGC | 3490 |
| 1762 | UCAUUGAU G CUUUUGGG | 1302 | CCCAAAAG UGAUG GCAUGCACUAUGC GCG AUCAAUGA | 3491 |
| 1805 | CUCUCAGC G CUCCAUCC | 1303 | GGAUGGAG UGAUG GCAUGCACUAUGC GCG GCUGAGAG | 3492 |
| 1819 | UCCAGCUU G AGAGUAAG | 1304 | CUUACUCU UGAUG GCAUGCACUAUGC GCG AAGCUGGA | 3493 |
| 1857 | CAGUGGAU G AAUGGCAC | 1305 | GUGCCAUU UGAUG GCAUGCACUAUGC GCG AUCCACUG | 3494 |
| 1869 | GGCACAGU G AUCGUGGA | 1306 | UCCACGAU UGAUG GCAUGCACUAUGC GCG ACUGUGCC | 3495 |
| 1923 | UGGACAAC G CAGCCUCC | 1307 | GGAGGCUG UGAUG GCAUGCACUAUGC GCG GUUGUCCA | 3496 |
| 2026 | CAGGCAUU G CUAAGGUU | 1308 | AACCUUAG UGAUG GCAUGCACUAUGC GCG AAUGCCUG | 3497 |
| 2055 | UACAGUCU G CAAGCAAG | 1309 | CUUGCUUG UGAUG GCAUGCACUAUGC GCG AGACUGUA | 3498 |
| 2076 | CAAACCUU G ACCCUGAC | 1310 | GUCAGGGU UGAUG GCAUGCACUAUGC GCG AAGGUUUG | 3499 |
| 2082 | UUGACCCU G ACUGUCAC | 1311 | GUGACAGU UGAUG GCAUGCACUAUGC GCG AGGGUCAA | 3500 |
| 2098 | CGUCCCGU G CGUCCAAU | 1312 | AUUGGACG UGAUG GCAUGCACUAUGC GCG ACGGGACG | 3501 |
| 2107 | CGUCCAAU G CUACCCUG | 1313 | CAGGGUAG UGAUG GCAUGCACUAUGC GCG AUUGGACG | 3502 |
| 2115 | GCUACCCU G CCUCCAAU | 1314 | AUUGGAGG UGAUG GCAUGCACUAUGC GCG AGGGUAGC | 3503 |
| 2130 | AUUACAGU G ACUUCCAA | 1315 | UUGGAAGU UGAUG GCAUGCACUAUGC GCG ACUGUAAU | 3504 |
| 2142 | UCCAAAAC G AACAAGGA | 1316 | UCCUUGUU UGAUG GCAUGCACUAUGC GCG GUUUUGGA | 3505 |
| 2185 | UAGUUUAU G CAAAUAUU | 1317 | AAUAUUUG UGAUG GCAUGCACUAUGC GCG AUAAACUA | 3506 |
| 2195 | AAAUAUUC G CCAAGGAG | 1318 | CUCCUUGG UGAUG GCAUGCACUAUGC GCG GAAUAUUU | 3507 |
| 2238 | ACAGCCCU G AUUGAAUC | 1319 | GAUUCAAU UGAUG GCAUGCACUAUGC GCG AGGGCUGU | 3508 |
| 2242 | CCCUGAUU G AAUCAGUG | 1320 | CACUGAUU UGAUG GCAUGCACUAUGC GCG AAUCAGGG | 3509 |
| 2250 | GAAUCAGU G AAUGGAAA | 1321 | UUUCCAUU UGAUG GCAUGCACUAUGC GCG ACUGAUUC | 3510 |
| 2296 | GAGCAGGU G CUGAUGCU | 1322 | AGCAUCAG UGAUG GCAUGCACUAUGC GCG ACCUGCUC | 3511 |
| 2299 | CAGGUGCU G AUGCUACU | 1323 | AGUAGCAU UGAUG GCAUGCACUAUGC GCG AGCACCUG | 3512 |
| 2302 | GUGCUGAU G CUACUAAG | 1324 | CUUAGUAG UGAUG GCAUGCACUAUGC GCG AUCAGCAC | 3513 |
| 2314 | CUAAGGAU G ACGGUGUC | 1325 | GACACCGU UGAUG GCAUGCACUAUGC GCG AUCCUUAG | 3514 |
| 2347 | CAACUUAU G ACACGAAU | 1326 | AUUCGUGU UGAUG GCAUGCACUAUGC GCG AUAAGUUG | 3515 |
| 2352 | UAUGACAC G AAUGGUAG | 1327 | CUACCAUU UGAUG GCAUGCACUAUGC GCG GUGUCAUA | 3516 |
| 2376 | GUAAAAGU G CGGGCUCU | 1328 | AGAGCCCG UGAUG GCAUGCACUAUGC GCG ACUUUUAC | 3517 |
| 2398 | GAGUUAAC G CAGCCAGA | 1329 | UCUGGCUG UGAUG GCAUGCACUAUGC GCG GUUAACUC | 3518 |
| 2415 | CGGAGAGU G AUACCCCA | 1330 | UGGGGUAU UGAUG GCAUGCACUAUGC GCG ACUCUCCG | 3519 |
| 2458 | GCUGGAUU G AGAAUGAU | 1331 | AUCAUUCU UGAUG GCAUGCACUAUGC GCG AAUCCAGC | 3520 |
| 2464 | UUGAGAAU G AUGAAAUA | 1332 | UAUUUCAU UGAUG GCAUGCACUAUGC GCG AUUCUCAA | 3521 |
| 2467 | AGAAUGAU G AAAUACAA | 1333 | UUGUAUUU UGAUG GCAUGCACUAUGC GCG AUCAUUCU | 3522 |
| 2494 | CAAGACCU G AAAUUAAU | 1334 | AUUAAUUU UGAUG GCAUGCACUAUGC GCG AGGUCUUG | 3523 |
| 2509 | AUAAGGAU G AUGUUCAA | 1335 | UUGAACAU UGAUG GCAUGCACUAUGC GCG AUCCUUAU | 3524 |
| 2572 | UGGCUUCU G AUGUCCCA | 1336 | UGGGACAU UGAUG GCAUGCACUAUGC GCG AGAAGCCA | 3525 |
| 2584 | UCCCAAAU G CUCCCAUA | 1337 | UAUGGGAG UGAUG GCAUGCACUAUGC GCG AUUUGGGA | 3526 |
| 2596 | CCAUACCU G AUCUCUUC | 1338 | GAAGAGAU UGAUG GCAUGCACUAUGC GCG AGGUAUGG | 3527 |
| 2623 | AAAUCACC G ACCUGAAG | 1339 | CUUCAGGU UGAUG GCAUGCACUAUGC GCG GGUGAUUU | 3528 |
| 2628 | ACCGACCU G AAGGCGGA | 1340 | UCCGCCUU UGAUG GCAUGCACUAUGC GCG AGGUCGGU | 3529 |
| 2664 | AUUAAUCU G ACUUGGAC | 1341 | GUCCAAGU UGAUG GCAUGCACUAUGC GCG AGAUUAAU | 3530 |
| 2686 | CUGGGGAU G AUUAUGAC | 1342 | GUCAUAAU UGAUG GCAUGCACUAUGC GCG AUCCCCAG | 3531 |
| 2692 | AUGAUUAU G ACCAUGGA | 1343 | UCCAUGGU UGAUG GCAUGCACUAUGC GCG AUAAUCAU | 3532 |
| 2723 | UAUCAUUC G AAUAAGUA | 1344 | UACUUAUU UGAUG GCAUGCACUAUGC GCG GAAUGAUA | 3533 |
| 2743 | GUAUUCUU G AUCUCAGA | 1345 | UCUGAGAU UGAUG GCAUGCACUAUGC GCG AAGAAUAC | 3534 |
| 2764 | AGUUCAAU G AAUCUCUU | 1346 | AAGAGAUU UGAUG GCAUGCACUAUGC GCG AUUGAACU | 3535 |
| 2778 | CUUCAAGU G AAUACUAC | 1347 | GUAGUAUU UGAUG GCAUGCACUAUGC GCG ACUUGAAG | 3536 |
| 2788 | AUACUACU G CUCUCAUC | 1348 | GAUGAGAG UGAUG GCAUGCACUAUGC GCG AGUAGUAU | 3537 |
| 2815 | CCAACUCU G AGGAAGUC | 1349 | GACUUCCU UGAUG GCAUGCACUAUGC GCG AGAGUUGG | 3538 |
| 2854 | UUACUUUU G AAAAUGGC | 1350 | GCCAUUUU UGAUG GCAUGCACUAUGC GCG AAAAGUAA | 3539 |
| 2878 | UUUUCAUU G CUAUUCAG | 1351 | CUGAAUAG UGAUG GCAUGCACUAUGC GCG AAUGAAAA | 3540 |
| 2893 | AGGCUGUU G AUAAGGUC | 1352 | GACCUUAU UGAUG GCAUGCACUAUGC GCG AACAGCCU | 3541 |
| 2902 | AUAAGGUC G AUCUGAAA | 1353 | UUUCAGAU UGAUG GCAUGCACUAUGC GCG GACCUUAU | 3542 |
| 2907 | GUCGAUCU G AAAUCAGA | 1354 | UCUGAUUU UGAUG GCAUGCACUAUGC GCG AGAUCGAC | 3543 |
| 2929 | CCAACAUU G CACGAGUA | 1355 | UACUCGUG UGAUG GCAUGCACUAUGC GCG AAUGUUGG | 3544 |
| 2933 | CAUUGCAC G AGUAUCUU | 1356 | AAGAUACU UGAUG GCAUGCACUAUGC GCG GUGCAAUG | 3545 |
| 2964 | CAGACUCC G CCAGAGAC | 1357 | GUCUCUGG UGAUG GCAUGCACUAUGC GCG GGAGUCUG | 3546 |
| 2983 | CUAGUCCU G AUGAAACG | 1358 | CGUUUCAU UGAUG GCAUGCACUAUGC GCG AGGACUAG | 3547 |
| 2986 | GUCCUGAU G AAACGUCU | 1359 | AGACGUUU UGAUG GCAUGCACUAUGC GCG AUCAGGAC | 3548 |
| 2995 | AAACGUCU G CUCCUUGU | 1360 | ACAAGGAG UGAUG GCAUGCACUAUGC GCG AGACGUUU | 3549 |
| 3078 | GGAGAACU G CAGCUGUC | 1361 | GACAGCUG UGAUG GCAUGCACUAUGC GCG AGUUCUCC | 3550 |
| 3101 | CUAGGGCU G AAUUUUUG | 1362 | CAAAAAUU UGAUG GCAUGCACUAUGC GCG AGCCCUAG | 3551 |
| 3145 | CUUUUUUU G AUUAUAAA | 1363 | UUUAUAAU UGAUG GCAUGCACUAUGC GCG AAAAAAAG | 3552 |
| 3191 | UAGGGGGC G AUAUACUA | 1364 | UAGUAUAU UGAUG GCAUGCACUAUGC GCG GCCCCCUA | 3553 |
| 3244 | UAGGGGGC G AUAUACUA | 1364 | UAGUAUAU UGAUG GCAUGCACUAUGC GCG GCCCCCUA | 3553 |
| 3281 | UAGGGGGC G AUAAAAUA | 1365 | UAUUUUAU UGAUG GCAUGCACUAUGC GCG GCCCCCUA | 3554 |
| 3294 | AAUAAAAU G CUAAACAA | 1366 | UUGUUUAG UGAUG GCAUGCACUAUGC GCG AUUUUAUU | 3555 |
| 27 | AAAUGGAU G UGGAAUAU | 1367 | AUAUUCCA UGAUG GCAUGCACUAUGC GCG AUCCAUUU | 3556 |
| 52 | AUUUUCUU G UUUAAGGG | 1368 | CCCUUAAA UGAUG GCAUGCACUAUGC GCG AAGAAAAU | 3557 |
| 75 | GAAGAGGU G UUGAGGUU | 1369 | AACCUCAA UGAUG GCAUGCACUAUGC GCG ACCUCUUC | 3558 |
| 86 | GAGGUUAU G UCAAGCAU | 1370 | AUGCUUGA UGAUG GCAUGCACUAUGC GCG AUAACCUC | 3559 |
| 155 | AAGAUAUU G UUAUCAUU | 1371 | AAUGAUAA UGAUG GCAUGCACUAUGC GCG AAUAUCUU | 3560 |
| 221 | AAAGACCU G UGAUAAAC | 1372 | GUUUAUCA UGAUG GCAUGCACUAUGC GCG AGGUCUUU | 3561 |
| 253 | GGAAACGU G UGUGUAUA | 1373 | UAUAGACA UGAUG GCAUGCACUAUGC GCG ACGUUUCC | 3562 |
| 255 | AAACGUGU G UCUAUAUU | 1374 | AAUAUAGA UGAUG GCAUGCACUAUGC GCG ACACGUUU | 3563 |
| 273 | UCAUAUCU G UAUAUAUA | 1375 | UAUAUAUA UGAUG GCAUGCACUAUGC GCG AGAUAUGA | 3564 |
| 344 | AGGGAGAU G UACAGCAA | 1376 | UUGCUGUA UGAUG GCAUGCACUAUGC GCG AUCUCCCU | 3565 |
| 373 | AGAGUUCU G UGUUCAUC | 1377 | GAUGAACA UGAUG GCAUGCACUAUGC GCG AGAACUCU | 3566 |
| 375 | AGUUCUGU G UUCAUCUU | 1378 | AAGAUGAA UGAUG GCAUGCACUAUGC GCG ACAGAACU | 3567 |
| 457 | AAGGCAUU G UCGUUGCA | 1379 | UGCAACGA UGAUG GCAUGCACUAUGC GCG AAUGCCUU | 3568 |
| 478 | ACCCCAAU G UGCCAGAA | 1380 | UUCUGGCA UGAUG GCAUGCACUAUGC GCG AUUGGGGU | 3569 |
| 537 | GCAUCUCU G UAUCUGUU | 1381 | AACAGAUA UGAUG GCAUGCACUAUGC GCG AGAGAUGC | 3570 |
| 543 | CUGUAUCU G UUUGAAGC | 1382 | GCUUCAAA UGAUG GCAUGCACUAUGC GCG AGAUACAG | 3571 |
| 580 | UCAAAAAU G UUGCCAUU | 1383 | AAUGGCAA UGAUG GCAUGCACUAUGC GCG AUUUUUGA | 3572 |
| 625 | CUGACUAU G UGAGACCA | 1384 | UGGUCUCA UGAUG GCAUGCACUAUGC GCG AUAGUCAG | 3573 |
| 661 | AUGCUGAU G UUCUGGUU | 1385 | AACCAGAA UGAUG GCAUGCACUAUGC GCG AUCAGCAU | 3574 |
| 725 | GGGCAACU G UGGAGAGA | 1386 | UCUCUCCA UGAUG GCAUGCACUAUGC GCG AGUUGCCC | 3575 |
| 814 | AGGCAUUU G UCCAUGAG | 1387 | CUCAUGGA UGAUG GCAUGCACUAUGC GCG AAAUGCCU | 3576 |
| 911 | AGUAAGAU G UUCAGCAG | 1388 | CUGCUGAA UGAUG GCAUGCACUAUGC GCG AUCUUACU | 3577 |
| 937 | GUACAAAU G UAGUAAAG | 1389 | CUUUACUA UGAUG GCAUGCACUAUGC GCG AUUUGUAC | 3578 |
| 950 | AAAGAAGU G UCAGGGAG | 1390 | CUCCCUGA UGAUG GCAUGCACUAUGC GCG ACUUCUUU | 3579 |
| 965 | AGGCAGCU G UUACACCA | 1391 | UGGUGUAA UGAUG GCAUGCACUAUGC GCG AGCUGCCU | 3580 |
| 1019 | AAAAGGAU G UGAGUUUG | 1392 | CAAACUCA UGAUG GCAUGCACUAUGC GCG AUCCUUUU | 3581 |
| 1027 | GUGAGUUU G UUCUCCAA | 1393 | UUGGAGAA UGAUG GCAUGCACUAUGC GCG AAACUCAC | 3582 |
| 1065 | UCUAUAAU G UUUGCACA | 1394 | UGUGCAAA UGAUG GCAUGCACUAUGC GCG AUUAUAGA | 3583 |
| 1078 | CACAACAU G UUGAUUCU | 1395 | AGAAUCAA UGAUG GCAUGCACUAUGC GCG AUGUUGUG | 3584 |
| 1100 | UGAAUUCU G UACAGAAC | 1396 | GUUCUGUA UGAUG GCAUGCACUAUGC GCG AGAAUUCA | 3585 |
| 1270 | AAAGAAUU G UGUGUUUA | 1397 | UAAACACA UGAUG GCAUGCACUAUGC GCG AAUUCUUU | 3586 |
| 1272 | AGAAUUGU G UGUUUAGU | 1398 | ACUAAACA UGAUG GCAUGCACUAUGC GCG ACAAUUCU | 3587 |
| 1274 | AAUUGUGU G UUUAGUCC | 1399 | GGACUAAA UGAUG GCAUGCACUAUGC GCG ACACAAUU | 3588 |
| 1414 | CUGCCCAU G UACAAAGU | 1400 | ACUUUGUA UGAUG GCAUGCACUAUGC GCG AUGOGGAG | 3589 |
| 1534 | CAUUUACU G UGAUUAGG | 1401 | CCUAAUCA UGAUG GCAUGCACUAUGC GCG AGUAAAUG | 3590 |
| 1573 | CUGAAAUU G UGCUGCUG | 1402 | CAGCAGCA UGAUG GCAUGCACUAUGC GCG AAUUUCAG | 3591 |
| 1695 | GAGGAGCU G UCCAAAAU | 1403 | AUUUUGGA UGAUG GCAUGCACUAUGC GCG AGCUCCUC | 3592 |
| 1795 | AUGGAGCU G UCUCUCAG | 1404 | CUGAGAGA UGAUG GCAUGCACUAUGC GCG AGCUCCAU | 3593 |
| 1902 | GACACUUU G UUUCUUAU | 1405 | AUAAGAAA UGAUG GCAUGCACUAUGC GCG AAAGUGUC | 3594 |
| 1978 | GUGGCUUU G UAGUGGAC | 1406 | GUCCACUA UGAUG GCAUGCACUAUGC GCG AAAGCCAC | 3595 |
| 2086 | CCCUGACU G UCACGUCC | 1407 | GGACGUGA UGAUG GCAUGCACUAUGC GCG AGUCAGGG | 3596 |
| 2227 | GGGCCAGU G UCACAGCC | 1408 | GGCUGUGA UGAUG GCAUGCACUAUGC GCG ACUGGCCC | 3597 |
| 2320 | AUGACGGU G UCUACUCA | 1409 | UGAGUAGA UGAUG GCAUGCACUAUGC GCG ACCGUCAU | 3598 |
| 2368 | GAUACAGU G UAAAAGUG | 1410 | CACUUUUA UGAUG GCAUGCACUAUGC GCG ACUGUAUC | 3599 |
| 2439 | GGAGCACU G UACAUACC | 1411 | GGUAUGUA UGAUG GCAUGCACUAUGC GCG AGUGCUCC | 3600 |
| 2512 | AGGAUGAU G UUCAACAC | 1412 | GUGUUGAA UGAUG GCAUGCACUAUGC GCG AUCAUCCU | 3601 |
| 2529 | AAGCAAGU G UGUUUCAG | 1413 | CUGAAACA UGAUG GCAUGCACUAUGC GCG ACUUGCUU | 3602 |
| 2531 | GCAAGUGU G UUCAGCA | 1414 | UGCUGAAA UGAUG GCAUGCACUAUGC GCG ACACUUGC | 3603 |
| 2563 | GCUCAUUU G UGGCUUCU | 1415 | AGAAGCCA UGAUG GCAUGCACUAUGC GCG AAAUGAGC | 3604 |
| 2575 | CUUCUGAU G UCCCAAAU | 1416 | AUUUGGGA UGAUG GCAUGCACUAUGC GCG AUCAGAAG | 3605 |
| 2829 | GUCUUUUU G UUUAAACC | 1417 | GGUUUAAA UGAUG GCAUGCACUAUGC GCG AAAAAGAC | 3606 |
| 2890 | UUCAGGCU G UUGAUAAG | 1418 | CUUAUCAA UGAUG GCAUGCACUAUGC GCG AGCCUGAA | 3607 |
| 2943 | GUAUCUUU G UUUAUUCC | 1419 | GGAAUAAA UGAUG GCAUGCACUAUGC GCG AAAGAUAC | 3608 |
| 3002 | UGCUCCUU G UCCUAAUA | 1420 | UAUUAGGA UGAUG GCAUGCACUAUGC GCG AAGGAGCA | 3609 |
| 3057 | AAAAUUAU G UGGAAGUG | 1421 | CACUUCCA UGAUG GCAUGCACUAUGC GCG AUAAUUUU | 3610 |
| 3084 | CUGCAGCU G UCAAUAGC | 1422 | GCUAUUGA UGAUG GCAUGCACUAUGC GCG AGCUGCAG | 3611 |
| 3109 | GAAUUUUU G UCAGAUAA | 1423 | UUAUCUGA UGAUG GCAUGCACUAUGC GCG AAAAAUUC | 3612 |
| 3166 | UCUAAAAU G UAUUUUAG | 1424 | CUAAAAUA UGAUG GCAUGCACUAUGC GCG AUUUUAGA | 3613 |
| 3182 | GACUUCCU G UAGGGGGC | 1425 | GCCCCCUA UGAUG GCAUGCACUAUGC GCG AGGAAGUC | 3614 |
| 3272 | GACUUCCU G UAGGGGGC | 1425 | GCCCCCUA UGAUG GCAUGCACUAUGC GCG AGGAAGUC | 3614 |
| 3203 | UACUAAAU G UAUAUAGU | 1426 | ACUAUAUA UGAUG GCAUGCACUAUGC GCG AUUUAGUA | 3615 |
| 3227 | UACUAAAU G UAUUCCUG | 1427 | CAGGAAUA UGAUG GCAUGCACUAUGC GCG AUUUAGUA | 3616 |
| 3235 | GUAUUCCU G UAGGGGGC | 1428 | GCCCCCUA UGAUG GCAUGCACUAUGC GCG AGGAAUAC | 3617 |
| 3256 | UACUAAAU G UAUUUUAG | 1429 | CUAAAAUA UGAUG GCAUGCACUAUGC GCG AUUUAGUA | 3618 |

Input Sequence = NM_001285. Cut Site = YG/M or UG/U.
Arm Length = 8. Core Sequence = UGAUG GCAUGCACUAUGC GCG
NM_001285 (Homo sapiens chloride channel, calcium activated, 1 (CLCA 1) mRNA, 3311 bp)

[0193] TABLE VI
Human CLCA1 Zinzyme and Target Sequence 249.021

| | | Seq | | Rz Seq |
|---|---|---|---|---|
| Pos | Substrate | ID | Zinzyme | ID |
| 134 | ACAAGUAC G CAAUUUGA | 1215 | UCAAAUUG GCCGAAAGGCGAGUGAGGUCU GUACUUGU | 3619 |
| 312 | CGUAACCC G CAUUUUCC | 1220 | GGAAAAUG GCCGAAAGGCGAGUGAGGUCU GGGUUACG | 3620 |
| 463 | UUGUCGUU G CAAUCGAC | 1225 | GUCGAUUG GCCGAAAGGCGAGUGAGGUCU AACGACAA | 3621 |
| 480 | CCCAAUGU G CCAGAAGA | 1227 | UCUUCUGG GCCGAAAGGCGAGUGAGGUCU ACAUUGGG | 3622 |
| 583 | AAAAUGUU G CCAUUUUG | 1232 | CAAAAUGG GCCGAAAGGCGAGUGAGGUCU AACAUUUU | 3623 |
| 655 | ACAAAAAU G CUGAUGUU | 1238 | AACAUCAG GCCGAAAGGCGAGUGAGGUCU AUUUUUGU | 3624 |
| 670 | UUCUGGUU G CUGAGUCU | 1240 | AGACUCAG GCCGAAAGGCGAGUGAGGUCU AACCAGAA | 3625 |
| 769 | AUUUCAUU G CAGGAAAA | 1247 | UUUUCCUG GCCGAAAGGCGAGUGAGGUCU AAUGAAAU | 3626 |
| 980 | CAAAAGAU G CACAUUCA | 1255 | UGAAUGUG GCCGAAAGGCGAGUGAGGUCU AUCUUUUG | 3627 |
| 1040 | CCAAUCCC G CCAGACGG | 1258 | CCGUCUGG GCCGAAAGGCGAGUGAGGUCU GGGAUUGG | 3628 |
| 1069 | UAAUGUUU G CACAACAU | 1259 | AUGUUGUG GCCGAAAGGCGAGUGAGGUCU AAACAUUA | 3629 |
| 1151 | UCAAAAAU G CAAUCUCC | 1262 | GGAGAUUG GCCGAAAGGCGAGUGAGGUCU AUUUUUGA | 3630 |
| 1248 | UUCUCAUU G CUGCAGAU | 1268 | AUCUGCAG GCCGAAAGGCGAGUGAGGUCU AAUGAGAA | 3631 |
| 1251 | UCAUUGCU G CAGAUUGG | 1269 | CCAAUCUG GCCGAAAGGCGAGUGAGGUCU AGCAAUGA | 3632 |
| 1316 | UGGUAACC G CCUCAAUC | 1272 | GAUUGAGG GCCGAAAGGCGAGUGAGGUCU GGUUACCA | 3633 |
| 1353 | CUUUUCCU G CUGCAGAC | 1275 | GUCUGCAG GCCGAAAGGCGAGUGAGGUCU AGGAAAAG | 3634 |
| 1356 | UUCCUGCU G CAGACAGU | 1276 | ACUGUCUG GCCGAAAGGCGAGUGAGGUCU AGCAGGAA | 3635 |
| 1405 | UUGACAGU G CUGCCCAU | 1280 | AUGGGCAG GCCGAAAGGCGAGUGAGGUCU ACUGUCAA | 3636 |
| 1408 | ACAGUGCU G CCCAUGUA | 1281 | UACAUGGG GCCGAAAGGCGAGUGAGGUCU AGCACUGU | 3637 |
| 1465 | ACACACUC G CCAAAAGA | 1284 | UCUUUUGG GCCGAAAGGCGAGUGAGGUCU GAGUGUGU | 3638 |
| 1480 | GAUUACCU G CAGCAGCU | 1285 | AGCUGCUG GCCGAAAGGCGAGUGAGGUCU AGGUAAUC | 3639 |
| 1508 | GUCCAUCU G CAGCGGGC | 1286 | GCCCGCUG GCCGAAAGGCGAGUGAGGUCU AGAUGGAC | 3640 |
| 1575 | GAAAUUGU G CUGCUGAC | 1291 | GUCAGCAG GCCGAAAGGCGAGUGAGGUCU ACAAUUUC | 3641 |
| 1578 | AUUGUGCU G CUGACGGA | 1292 | UCCGUCAG GCCGAAAGGCGAGUGAGGUCU AGCACAAU | 3642 |
| 1613 | AAGUGGGU G CUUUAACG | 1294 | CGUUAAAG GCCGAAAGGCGAGUGAGGUCU ACCCACUU | 3643 |
| 1639 | AAAGUGGU G CCAUCAUC | 1296 | GAUGAUGG GCCGAAAGGCGAGUGAGGUCU ACCACUUU | 3644 |
| 1657 | ACACAGUC G CUUUGGGG | 1297 | CCCCAAAG GCCGAAAGGCGAGUGAGGUCU GACUGUGU | 3645 |
| 1672 | GGCCCUCU G CAGCUCAA | 1298 | UUGAGCUG GCCGAAAGGCGAGUGAGGUCU AGAGGGCC | 3646 |
| 1726 | AGACAUAU G CUUCAGAU | 1300 | AUCUGAAG GCCGAAAGGCGAGUGAGGUCU AUAUGUCU | 3647 |
| 1762 | UCAUUGAU G CUUUUGGG | 1302 | CCCAAAAG GCCGAAAGGCGAGUGAGGUCU AUCAAUGA | 3648 |
| 1805 | CUCUCAGC G CUCCAUCC | 1303 | GGAUGGAG GCCGAAAGGCGAGUGAGGUCU GCUGAGAG | 3649 |
| 1923 | UGGACAAC G CAGCCUCC | 1307 | GGAGGCUG GCCGAAAGGCGAGUGAGGUCU GUUGUCCA | 3650 |
| 2026 | CAGGCAUU G CUAAGGUU | 1308 | AACCUUAG GCCGAAAGGCGAGUGAGGUCU AAUGCCUG | 3651 |
| 2055 | UACAGUCU G CAAGCAAG | 1309 | CUUGCUUG GCCGAAAGGCGAGUGAGGUCU AGACUGUA | 3652 |
| 2098 | CGUCCCGU G CGUCCAAU | 1312 | AUUGGACG GCCGAAAGGCGAGUGAGGUCU ACGGGACG | 3653 |
| 2107 | CGUCCAAU G CUACCCUG | 1313 | CAGGGUAG GCCGAAAGGCGAGUGAGGUCU AUUGGACG | 3654 |
| 2115 | GCUACCCU G CCUCCAAU | 1314 | AUGGAGG GCCGAAAGGCGAGUGAGGUCU AGGGUAGC | 3655 |
| 2185 | UAGUUUAU G CAAAUAUU | 1317 | AAUAUUUG GCCGAAAGGCGAGUGAGGUCU AUAAACUA | 3656 |
| 2195 | AAAUAUUC G CCAAGGAG | 1318 | CUCCUUGG GCCGAAAGGCGAGUGAGGUCU GAAUAUUU | 3657 |
| 2296 | GAGCAGGU G CUGAUGCU | 1322 | AGCAUCAG GCCGAAAGGCGAGUGAGGUCU ACCUGCUC | 3658 |
| 2302 | GUGCUGAU G CUACUAAG | 1324 | CUUAGUAG GCCGAAAGGCGAGUGAGGUCU AUCAGCAC | 3659 |
| 2376 | GUAAAAGU G CGGGCUCU | 1328 | AGAGCCCG GCCGAAAGGCGAGUGAGGUCU ACUUUUAC | 3660 |
| 2398 | GAGUUAAC G CAGCCAGA | 1329 | UCUGGCUG GCCGAAAGGCGAGUGAGGUCU GUUAACUC | 3661 |
| 2584 | UCCCAAAU G CUCCCAUA | 1337 | UAUGGGAG GCCGAAAGGCGAGUGAGGUCU AUUUGGGA | 3662 |
| 2788 | AUACUACU G CUCUCAUC | 1348 | GAUGAGAG GCCGAAAGGCGAGUGAGGUCU AGUAGUAU | 3663 |
| 2878 | UUUUCAUU G CUAUUCAG | 1351 | CUGAAUAG GCCGAAAGGCGAGUGAGGUCU AAUGAAAA | 3664 |
| 2929 | CCAACAUU G CACGAGUA | 1355 | UACUCGUG GCCGAAAGGCGAGUGAGGUCU AAUGUUGG | 3665 |
| 2964 | CAGACUCC G CCAGAGAC | 1357 | GUCUCUGG GCCGAAAGGCGAGUGAGGUCU GGAGUCUG | 3666 |
| 2995 | AAACGUCU G CUCCUUGU | 1360 | ACAAGGAG GCCGAAAGGCGAGUGAGGUCU AGACGUUU | 3667 |
| 3078 | GGAGAACU G CAGCUGUC | 1361 | GACAGCUG GCCGAAAGGCGAGUGAGGUCU AGUUCUCC | 3668 |
| 3294 | AAUAAAAU G CUAAACAA | 1366 | UUGUUUAG GCCGAAAGGCGAGUGAGGUCU AUUUUAUU | 3669 |
| 27 | AAAUGGAU G UGGAAUAU | 1367 | AUAUUCCA GCCGAAAGGCGAGUGAGGUCU AUCCAUUU | 3670 |
| 52 | AUUUUCUU G UUUAAGGG | 1368 | CCCUUAAA GCCGAAAGGCGAGUGAGGUCU AAGAAAAU | 3671 |
| 75 | GAAGAGGU G UUGAGGUU | 1369 | AACCUCAA GCCGAAAGGCGAGUGAGGUCU ACCUCUUC | 3672 |
| 86 | GAGGUUAU G UCAAGCAU | 1370 | AUGCUUGA GCCGAAAGGCGAGUGAGGUCU AUAACCUC | 3673 |
| 155 | AAGAUAUU G UUAUCAUU | 1371 | AAUGAUAA GCCGAAAGGCGAGUGAGGUCU AAUAUCUU | 3674 |
| 221 | AAAGACCU G UGAUAAAC | 1372 | GUUUAUCA GCCGAAAGGCGAGUGAGGUCU AGGUCUUU | 3675 |
| 253 | GGAAACGU G UGUCUAUA | 1373 | UAUAGACA GCCGAAAGGCGAGUGAGGUCU ACGUUUCC | 3676 |
| 255 | AAACGUGU G UCUAUAUU | 1374 | AAUAUAGA GCCGAAAGGCGAGUGAGGUCU ACACGUUU | 3677 |
| 273 | UCAUAUCU G UAUAUAUA | 1375 | UAUAUAUA GCCGAAAGGCGAGUGAGGUCU AGAUAUGA | 3678 |
| 344 | AGGGAGAU G UACAGCAA | 1376 | UUGCUGUA GCCGAAAGGCGAGUGAGGUCU AUCUCCCU | 3679 |
| 373 | AGAGUUCU G UGUUCAUC | 1377 | GAUGAACA GCCGAAAGGCGAGUGAGGUCU AGAACUCU | 3680 |
| 375 | AGUUCUGU G UUCAUCUU | 1378 | AAGAUGAA GCCGAAAGGCGAGUGAGGUCU ACAGAACU | 3681 |
| 457 | AAGGCAUU G UCGUUGCA | 1379 | UGCAACGA GCCGAAAGGCGAGUGAGGUCU AAUGCCUU | 3682 |
| 478 | ACCCCAAU G UGCCAGAA | 1380 | UUCUGGCA GCCGAAAGGCGAGUGAGGUCU AUUGGGGU | 3683 |
| 537 | GCAUCUCU G UAUCUGUU | 1381 | AACAGAUA GCCGAAAGGCGAGUGAGGUCU AGAGAUGC | 3684 |
| 543 | CUGUAUCU G UUUGAAGC | 1382 | GCUUCAAA GCCGAAAGGCGAGUGAGGUCU AGAUACAG | 3685 |
| 580 | UCAAAAAU G UUGCCAUU | 1383 | AAUGGCAA GCCGAAAGGCGAGUGAGGUCU AUUUUUGA | 3686 |
| 625 | CUGACUAU G UGAGACCA | 1384 | UGGUCUCA GCCGAAAGGCGAGUGAGGUCU AUAGUCAG | 3687 |
| 661 | AUGCUGAU G UUCUGGUU | 1385 | AACCAGAA GCCGAAAGGCGAGUGAGGUCU AUCAGCAU | 3688 |
| 725 | GGGCAACU G UGGAGAGA | 1386 | UCUCUCCA GCCGAAAGGCGAGUGAGGUCU AGUUGCCC | 3689 |
| 814 | AGGCAUUU G UCCAUGAG | 1387 | CUCAUGGA GCCGAAAGGCGAGUGAGGUCU AAAUGCCU | 3690 |
| 911 | AGUAAGAU G UUCAGCAG | 1388 | CUGCUGAA GCCGAAAGGCGAGUGAGGUCU AUCUUACU | 3691 |
| 937 | GUACAAAU G UAGUAAAG | 1389 | CUUUACUA GCCGAAAGGCGAGUGAGGUCU AUUUUAC | 3692 |
| 950 | AAAGAAGU G UCAGGGAG | 1390 | CUCCCUGA GCCGAAAGGCGAGUGAGGUCU ACUUCUUU | 3693 |
| 965 | AGGCAGCU G UUACACCA | 1391 | UGGUGUAA GCCGAAAGGCGAGUGAGGUCU AGCUGCCU | 3694 |
| 1019 | AAAAGGAU G UGAGUUUG | 1392 | CAAACUCA GCCGAAAGGCGAGUGAGGUCU AUCCUUUU | 3695 |
| 1027 | GUGAGUUU G UUCUCCAA | 1393 | UUGGAGAA GCCGAAAGGCGAGUGAGGUCU AAACUCAC | 3696 |
| 1065 | UCUAUAAU G UUUGCACA | 1394 | UGUGCAAA GCCGAAAGGCGAGUGAGGUCU AUUAUAGA | 3697 |
| 1078 | CACAACAU G UUGAUUCU | 1395 | AGAAUCAA GCCGAAAGGCGAGUGAGGUCU AUGUUGUG | 3698 |
| 1100 | UGAAUUCU G UACAGAAC | 1396 | GUUCUGUA GCCGAAAGGCGAGUGAGGUCU AGAAUUCA | 3699 |
| 1270 | AAAGAAUU G UGUGUUUA | 1397 | UAAACACA GCCGAAAGGCGAGUGAGGUCU AAUUCUUU | 3700 |
| 1272 | AGAAUUGU G UGUUUAGU | 1398 | ACUAAACA GCCGAAAGGCGAGUGAGGUCU ACAAUUCU | 3701 |
| 1274 | AAUUGUGU G UUUAGUCC | 1399 | GGACUAAA GCCGAAAGGCGAGUGAGGUCU ACACAAUU | 3702 |
| 1414 | CUGCCCAU G UACAAAGU | 1400 | ACUUUGUA GCCGAAAGGCGAGUGAGGUCU AUGGGCAG | 3703 |
| 1534 | CAUUUACU G UGAUUAGG | 1401 | CCUAAUCA GCCGAAAGGCGAGUGAGGUCU AGUAAAUG | 3704 |
| 1573 | CUGAAAUU G UGCUGCUG | 1402 | CAGGAGGA GCCGAAAGGCGAGUGAGGUCU AAUUUCAG | 3705 |
| 1695 | GAGGAGCU G UCCAAAAU | 1403 | AUUUUGGA GCCGAAAGGCGAGUGAGGUCU AGCUCCUC | 3706 |
| 1795 | AUGGAGCU G UCUCUCAG | 1404 | CUGAGAGA GCCGAAAGGCGAGUGAGGUCU AGCUCCAU | 3707 |
| 1902 | GACACUUU G UUUCUUAU | 1405 | AUAAGAAA GCCGAAAGGCGAGUGAGGUCU AAAGUGUC | 3708 |
| 1978 | GUGGCUUU G UAGUGGAC | 1406 | GUCCACUA GCCGAAAGGCGAGUGAGGUCU AAAGCCAC | 3709 |
| 2086 | CCCUGACU G UCACGUCC | 1407 | GGACGUGA GCCGAAAGGCGAGUGAGGUCU AGUCAGGG | 3710 |
| 2227 | GGGCCAGU G UCACAGCC | 1408 | GGCUGUGA GCCGAAAGGCGAGUGAGGUCU ACUGGCCC | 3711 |
| 2320 | AUGACGGU G UCUACUCA | 1409 | UGAGUAGA GCCGAAAGGCGAGUGAGGUCU ACCGUCAU | 3712 |
| 2368 | GAUACAGU G UAAAGUG | 1410 | CACUUUUA GCCGAAAGGCGAGUGAGGUCU ACUGUAUC | 3713 |
| 2439 | GGAGCACU G UACAUACC | 1411 | GGUAUGUA GCCGAAAGGCGAGUGAGGUCU AGUGCUCC | 3714 |
| 2512 | AGGAUGAU G UUCAACAC | 1412 | GUGUUGAA GCCGAAAGGCGAGUGAGGUCU AUCAUCCU | 3715 |
| 2529 | AAGCAAGU G UGUUUCAG | 1413 | CUGAAACA GCCGAAAGGCGAGUGAGGUCU ACUUGCUU | 3716 |
| 2531 | GCAAGUGU G UUUCAGCA | 1414 | UGCUGAAA GCCGAAAGGCGAGUGAGGUCU ACACUUGC | 3717 |
| 2563 | GCUCAUUU G UGGCUUCU | 1415 | AGAAGCCA GCCGAAAGGCGAGUGAGGUCU AAAUGAGC | 3718 |
| 2575 | CUUCUGAU G UCCCAAAU | 1416 | AUUUGGGA GCCGAAAGGCGAGUGAGGUCU AUCAGAAG | 3719 |
| 2829 | GUCUUUUU G UUUAUACC | 1417 | GGUUUAAA GCCGAAAGGCGAGUGAGGUCU AAAAAGAC | 3720 |
| 2890 | UUCAGGCU G UUGAUAAG | 1418 | CUUAUCAA GCCGAAAGGCGAGUGAGGUCU AGCCUGAA | 3721 |
| 2943 | GUAUCUUU G UUUAUUCC | 1419 | GGAAUAAA GCCGAAAGGCGAGUGAGGUCU AAAGAUAC | 3722 |
| 3002 | UGCUCCUU G UCCUAAUA | 1420 | UAUUAGGA GCCGAAAGGCGAGUGAGGUCU AAGGAGCA | 3723 |
| 3057 | AAAAUUAU G UGGAAGUG | 1421 | CACUUCCA GCCGAAAGGCGAGUGAGGUCU AUAAUUUU | 3724 |
| 3084 | CUGCAGCU G UCAAUAGC | 1422 | GCUAUUGA GCCGAAAGGCGAGUGAGGUCU AGCUGCAG | 3725 |
| 3109 | GAAUUUUU G UCAGAUAA | 1423 | UUAUCUGA GCCGAAAGGCGAGUGAGGUCU AAAAAUUC | 3726 |
| 3166 | UCUAAAAU G UAUUUUAG | 1424 | CUAAAAUA GCCGAAAGGCGAGUGAGGUCU AUUUUAGA | 3727 |
| 3182 | GACUUCCU G UAGGGGGC | 1425 | GCCCCCUA GCCGAAAGGCGAGUGAGGUCU AGGAAGUC | 3728 |
| 3272 | GACUUCCU G UAGGGGGC | 1425 | GCCCCCUA GCCGAAAGGCGAGUGAGGUCU AGGAAGUC | 3728 |
| 3203 | UACUAAAU G UAUAUAGU | 1426 | ACUAUAUA GCCGAAAGGCGAGUGAGGUCU AUUUAGUA | 3729 |
| 3227 | UACUAAAU G UAUUCCUG | 1427 | CAGGAAUA GCCGAAAGGCGAGUGAGGUCU AUUUAGUA | 3730 |
| 3235 | GUAUUCCU G UAGGGGGC | 1428 | GCCCCCUA GCCGAAAGGCGAGUGAGGUCU AGGAAUAC | 3731 |
| 3256 | UACUAAAU G UAUUUUAG | 1429 | CUAAAAUA GCCGAAAGGCGAGUGAGGUCU AUUUAGUA | 3732 |
| 15 | UGCUUUUG G UACAAAUG | 1430 | CAUUUGUA GCCGAAAGGCGAGUGAGGUCU CAAAAGCA | 3733 |
| 63 | UAAGGGGA G CAUGAAGA | 1431 | UCUUCAUG GCCGAAAGGCGAGUGAGGUCU UCCCCUUA | 3734 |
| 73 | AUGAAGAG G UGUUGAGG | 1432 | CCUCAACA GCCGAAAGGCGAGUGAGGUCU CUCUUCAU | 3735 |
| 81 | GUGUUGAG G UUAUGUCA | 1433 | UGACAUAA GCCGAAAGGCGAGUGAGGUCU CUCAACAC | 3736 |
| 91 | UAUGUCAA G CAUCUGGC | 1434 | GCCAGAUG GCCGAAAGGCGAGUGAGGUCU UUGACAUA | 3737 |
| 98 | AGCAUCUG G CACAGCUG | 1435 | CAGCUGUG GCCGAAAGGCGAGUGAGGUCU CAGAUGCU | 3738 |
| 103 | CUGGCACA G CUGAAGGC | 1436 | GCCUUCAG GCCGAAAGGCGAGUGAGGUCU UGUGCCAG | 3739 |
| 110 | AGCUGAAG G CAGAUGGA | 1437 | UCCAUCUG GCCGAAAGGCGAGUGAGGUCU CUUCAGCU | 3740 |
| 130 | AUUUACAA G UACGCAAU | 1438 | AUUGCGUA GCCGAAAGGCGAGUGAGGUCU UUGUAAAU | 3741 |
| 182 | AGACAAGA G CAAUAGUA | 1439 | UACUAUUG GCCGAAAGGCGAGUGAGGUCU UCUUGUCU | 3742 |
| 188 | GAGCAAUA G UAAAACAC | 1440 | GUGUUUUA GCCGAAAGGCGAGUGAGGUCU UAUUGCUC | 3743 |
| 202 | CACAUCAG G UCAGGGGG | 1441 | CCCCCUGA GCCGAAAGGCGAGUGAGGUCU CUGAUGUG | 3744 |
| 210 | GUCAGGGG G UUAAAGAC | 1442 | GUCUUUAA GCCGAAAGGCGAGUGAGGUCU CCCCUGAC | 3745 |
| 242 | UCCGAUAA G UUGGAAAC | 1443 | GUUUCCAA GCCGAAAGGCGAGUGAGGUCU UUAUCGGA | 3746 |
| 251 | UUGGAAAC G UGUGUCUA | 1444 | UAGACACA GCCGAAAGGCGAGUGAGGUCU GUUUCCAA | 3747 |
| 287 | AUAUAAUG G UAAAGAAA | 1445 | UUUCUUUA GCCGAAAGGCGAGUGAGGUCU CAUUAUAU | 3748 |
| 305 | ACACCUUC G UAACCCGC | 1446 | GCGGGUUA GCCGAAAGGCGAGUGAGGUCU GAAGGUGU | 3749 |
| 349 | GAUGUACA G CAAUGGGG | 1447 | CCCCAUUG GCCGAAAGGCGAGUGAGGUCU UGUACAUC | 3750 |
| 357 | GCAAUGGG G CCAUUUAA | 1448 | UUAAAUGG GCCGAAAGGCGAGUGAGGUCU CCCAUUGC | 3751 |
| 368 | AUUUAAGA G UUCUGUGU | 1449 | ACACAGAA GCCGAAAGGCGAGUGAGGUCU UCUUAAAU | 3752 |
| 406 | UAGAAGGG G CCCUGAGU | 1450 | ACUCAGGG GCCGAAAGGCGAGUGAGGUCU CCCUUCUA | 3753 |
| 413 | GGCCCUGA G UAAUUCAC | 1451 | GUGAAUUA GCCGAAAGGCGAGUGAGGUCU UCAGGGCC | 3754 |
| 429 | CUCAUUCA G CUGAACAA | 1452 | UUGUUCAG GCCGAAAGGCGAGUGAGGUCU UGAAUGAG | 3755 |
| 443 | CAACAAUG G CUAUGAAG | 1453 | CUUCAUAG GCCGAAAGGCGAGUGAGGUCU CAUUGUUG | 3756 |
| 452 | CUAUGAAG G CAUUGUCG | 1454 | CGACAAUG GCCGAAAGGCGAGUGAGGUCU CUUCAUAG | 3757 |
| 460 | GCAUUGUC G UUGCAAUC | 1455 | GAUUGCAA GCCGAAAGGCGAGUGAGGUCU GACAAUGC | 3758 |
| 520 | AGGACAUG G UGACCCAG | 1456 | CUGGGUCA GCCGAAAGGCGAGUGAGGUCU CAUGUCCU | 3759 |
| 529 | UGACCCAG G CAUCUCUG | 1457 | CAGAGAUG GCCGAAAGGCGAGUGAGGUCU CUGGGUCA | 3760 |
| 550 | UGUUUGAA G CUACAGGA | 1458 | UCCUGUAG GCCGAAAGGCGAGUGAGGUCU UUCAAACA | 3761 |
| 561 | ACAGGAAA G CGAUUUUA | 1459 | UAAAAUCG GCCGAAAGGCGAGUGAGGUCU UUUCCUGU | 3762 |
| 616 | AGACAAAG G CUGACUAU | 1460 | AUAGUCAG GCCGAAAGGCGAGUGAGGUCU CUUUGUCU | 3763 |
| 667 | AUGUUCUG G UUGCUGAG | 1461 | CUCAGCAA GCCGAAAGGCGAGUGAGGUCU CAGAACAU | 3764 |
| 675 | GUUGCUGA G UCUACUCC | 1462 | GGAGUAGA GCCGAAAGGCGAGUGAGGUCU UCAGCAAC | 3765 |
| 689 | UCCUCCAG G UAAUGAUG | 1463 | CAUCAUUA GCCGAAAGGCGAGUGAGGUCU CUGGAGGA | 3766 |
| 711 | UACACUGA G CAGAUGGG | 1464 | CCCAUCUG GCCGAAAGGCGAGUGAGGUCU UCAGUGUA | 3767 |
| 719 | GCAGAUGG G CAACUGUG | 1465 | CACAGUUG GCCGAAAGGCGAGUGAGGUCU CCAUCUGC | 3768 |
| 737 | AGAGAAGG G UGAAAGGA | 1466 | UCCUUUCA GCCGAAAGGCGAGUGAGGUCU CCUUCUCU | 3769 |
| 780 | GGAAAAAA G UUAGCUGA | 1467 | UCAGCUAA GCCGAAAGGCGAGUGAGGUCU UUUUUUCC | 3770 |
| 784 | AAAAGUUA G CUGAAUAU | 1468 | AUAUUCAG GCCGAAAGGCGAGUGAGGUCU UAACUUUU | 3771 |
| 803 | ACCACAAG G UAAGGCAU | 1469 | AUGCCUUA GCCGAAAGGCGAGUGAGGUCU CUUGUGGU | 3772 |
| 808 | AAGGUAAG G CAUUUGUC | 1470 | GACAAAUG GCCGAAAGGCGAGUGAGGUCU CUUACCUU | 3773 |
| 822 | GUCCAUGA G UGGGCUCA | 1471 | UGAGCCCA GCCGAAAGGCGAGUGAGGUCU UCAUGGAC | 3774 |
| 826 | AUGAGUGG G CUCAUCUA | 1472 | UAGAUGAG GCCGAAAGGCGAGUGAGGUCU CCACUCAU | 3775 |
| 844 | GAUGGGGA G UAUUUGAC | 1473 | GUCAAAUA GCCGAAAGGCGAGUGAGGUCU UCCCCAUC | 3776 |
| 855 | UUUGACGA G UACAAUAA | 1474 | UUAUUGUA GCCGAAAGGCGAGUGAGGUCU UCGUCAAA | 3777 |
| 901 | GAAUACAA G CAGUAAGA | 1475 | UCUUACUG GCCGAAAGGCGAGUGAGGUCU UUGUAUUC | 3778 |
| 904 | UACAAGCA G UAAGAUGU | 1476 | ACAUCUUA GCCGAAAGGCGAGUGAGGUCU UGCUUGUA | 3779 |
| 916 | GAUGUUCA G CAGGUAUU | 1477 | AAUACCUG GCCGAAAGGCGAGUGAGGUCU UGAACAUC | 3780 |
| 920 | UUCAGCAG G UAUUACUG | 1478 | CAGUAAUA GCCGAAAGGCGAGUGAGGUCU CUGCUGAA | 3781 |
| 929 | UAUUACUG G UACAAAUG | 1479 | CAUUUGUA GCCGAAAGGCGAGUGAGGUCU CAGUAAUA | 3782 |
| 940 | CAAAUGUA G UAAAGAAG | 1480 | CUUCUUUA GCCGAAAGGCGAGUGAGGUCU UACAUUUG | 3783 |
| 948 | GUAAAGAA G UGUCAGGG | 1481 | CCCUGACA GCCGAAAGGCGAGUGAGGUCU UUCUUUAC | 3784 |
| 959 | UCAGGGAG G CAGCUGUU | 1482 | AACAGCUG GCCGAAAGGCGAGUGAGGUCU CUCCCUGA | 3785 |
| 962 | GGGAGGCA G CUGUUACA | 1483 | UGUAACAG GCCGAAAGGCGAGUGAGGUCU UGCCUCCC | 3786 |
| 994 | UCAAUAAA G UUACAGGA | 1484 | UCCUGUAA GCCGAAAGGCGAGUGAGGUCU UUUAUUGA | 3787 |
| 1023 | GGAUGUGA G UUUGUUCU | 1485 | AGAACAAA GCCGAAAGGCGAGUGAGGUCU UCACAUCC | 3788 |
| 1054 | CGGAGAAG G CUUCUAUA | 1486 | UAUAGAAG GCCGAAAGGCGAGUGAGGUCU CUUCUCCG | 3789 |
| 1090 | AUUCUAUA G UUGAAUUC | 1487 | GAAUUCAA GCCGAAAGGCGAGUGAGGUCU UAUAGAAU | 3790 |
| 1126 | ACAAAGAA G CUCCAAAC | 1488 | GUUUGGAG GCCGAAAGGCGAGUGAGGUCU UUCUUUGU | 3791 |
| 1137 | CCAAACAA G CAAAAUCA | 1489 | UGAUUUUG GCCGAAAGGCGAGUGAGGUCU UUGUUUGG | 3792 |
| 1163 | UCUCCGAA G CACAUGGG | 1490 | CCCAUGUG GCCGAAAGGCGAGUGAGGUCU UUCGGAGA | 3793 |
| 1174 | CAUGGGAA G UGAUCCGU | 1491 | ACGGAUCA GCCGAAAGGCGAGUGAGGUCU UUCCCAUG | 3794 |
| 1181 | AGUGAUCC G UGAUUCUG | 1492 | CAGAAUCA GCCGAAAGGCGAGUGAGGUCU GGAUCACU | 3795 |
| 1224 | ACAACACA G CCACCAAA | 1493 | UUUGGUGG GCCGAAAGGCGAGUGAGGUCU UGUGUUGU | 3796 |
| 1279 | UGUGUUUA G UCCUUGAC | 1494 | GUCAAGGA GCCGAAAGGCGAGUGAGGUCU UAAACACA | 3797 |
| 1298 | AUCUGGAA G CAUGGCGA | 1495 | UCGCCAUG GCCGAAAGGCGAGUGAGGUCU UUCCAGAU | 3798 |
| 1303 | GAAGCAUG G CGACUGGU | 1496 | ACCAGUCG GCCGAAAGGCGAGUGAGGUCU CAUGCUUC | 3799 |
| 1310 | GGCGACUG G UAACCGCC | 1497 | GGCGGUUA GCCGAAAGGCGAGUGAGGUCU CAGUCGCC | 3800 |
| 1336 | UGAAUCAA G CAGGCCAG | 1498 | CUGGCCUG GCCGAAAGGCGAGUGAGGUCU UUGAUUCA | 3801 |
| 1340 | UCAAGCAG G CCAGCUUU | 1499 | AAAGCUGG GCCGAAAGGCGAGUGAGGUCU CUGCUUGA | 3802 |
| 1344 | GCAGGCCA G CUUUUCCU | 1500 | AGGAAAAG GCCGAAAGGCGAGUGAGGUCU UGGCCUGC | 3803 |
| 1363 | UGCAGACAG UUGAGCUG | 1501 | CAGCUCAA GCCGAAAGGCGAGUGAGGUCU UGUCUGCA | 3804 |
| 1368 | ACAGUUGA G CUGGGGUC | 1502 | GACCCCAG GCCGAAAGGCGAGUGAGGUCU UCAACUGU | 3805 |
| 1374 | GAGCUGGG G UCCUGGGU | 1503 | ACCCAGGA GCCGAAAGGCGAGUGAGGUCU CCCAGCUC | 3806 |
| 1381 | GGUCCUGG G UUGGGAUG | 1504 | CAUCCCAA GCCGAAAGGCGAGUGAGGUCU CCAGGACC | 3807 |
| 1390 | UUGGGAUG G UGACAUUU | 1505 | AAAUGUCA GCCGAAAGGCGAGUGAGGUCU CAUCCCAA | 3808 |
| 1403 | AUUUGACA G UGCUGCCC | 1506 | GGGCAGCA GCCGAAAGGCGAGUGAGGUCU UGUCAAAU | 3809 |
| 1421 | UGUACAAA G UGAACUCA | 1507 | UGAGUUCA GCCGAAAGGCGAGUGAGGUCU UUUGUACA | 3810 |
| 1442 | GAUAAACA G UGGCAGUG | 1508 | CACUGCCA GCCGAAAGGCGAGUGAGGUCU UGUUUAUC | 3811 |
| 1445 | AAACAGUG G CAGUGACA | 1509 | UGUCACUG GCCGAAAGGCGAGUGAGGUCU CACUGUUU | 3812 |
| 1448 | CAGUGGCA G UGACAGGG | 1510 | CCCUGUCA GCCGAAAGGCGAGUGAGGUCU UGCCACUG | 3813 |
| 1483 | UACCUGCA G CAGCUUCA | 1511 | UGAAGCUG GCCGAAAGGCGAGUGAGGUCU UGCAGGUA | 3814 |
| 1486 | CUGCAGCA G CUUCAGGA | 1512 | UCCUGAAG GCCGAAAGGCGAGUGAGGUCU UGCUGCAG | 3815 |
| 1500 | GGAGGGAC G UCCAUCUG | 1513 | CAGAUGGA GCCGAAAGGCGAGUGAGGUCU GUCCCUCC | 3816 |
| 1511 | CAUCUGCA G CGGGCUUC | 1514 | GAAGCCCG GCCGAAAGGCGAGUGAGGUCU UGCAGAUG | 3817 |
| 1515 | UGCAGCGG G CUUCGAUC | 1515 | GAUCGAAG GCCGAAAGGCGAGUGAGGUCU CCGCUGCA | 3818 |
| 1525 | UUCGAUCG G CAUUUACU | 1516 | AGUAAAUG GCCGAAAGGCGAGUGAGGUCU CGAUCGAA | 3819 |
| 1607 | CACUAUAA G UGGGUGCU | 1517 | AGCACCCA GCCGAAAGGCGAGUGAGGUCU UUAUAGUG | 3820 |
| 1611 | AUAAGUGG G UGCUUUAA | 1518 | UUAAAGCA GCCGAAAGGCGAGUGAGGUCU CCACUUAU | 3821 |
| 1624 | UUAACGAG G UCAAACAA | 1519 | UUGUUUGA GCCGAAAGGCGAGUGAGGUCU CUCGUUAA | 3822 |
| 1634 | CAAACAAA G UGGUGCCA | 1520 | UGGCACCA GCCGAAAGGCGAGUGAGGUCU UUUGUUUG | 3823 |
| 1637 | ACAAAGUG G UGCCAUCA | 1521 | UGAUGGCA GCCGAAAGGCGAGUGAGGUCU CACUUUGU | 3824 |
| 1654 | UCCACACA G UCGCUUUG | 1522 | CAAAGCGA GCCGAAAGGCGAGUGAGGUCU UGUGUGGA | 3825 |
| 1665 | GCUUUGGG G CCCUCUGC | 1523 | GCAGAGGG GCCGAAAGGCGAGUGAGGUCU CCCAAAGC | 3826 |
| 1675 | CCUCUGCA G CUCAAGAA | 1524 | UUCUUGAG GCCGAAAGGCGAGUGAGGUCU UGCAGAGG | 3827 |
| 1692 | CUAGAGGA G CUGUCCAA | 1525 | UUGGACAG GCCGAAAGGCGAGUGAGGUCU UCCUCUAG | 3828 |
| 1712 | GACAGGAG G UUUACAGA | 1526 | UCUGUAAA GCCGAAAGGCGAGUGAGGUCU CUCCUGUC | 3829 |
| 1738 | CAGAUCAA G UUCAGAAC | 1527 | GUUCUGAA GCCGAAAGGCGAGUGAGGUCU UUGAUCUG | 3830 |
| 1751 | GAACAAUG G CCUCAUUG | 1528 | CAAUGAGG GCCGAAAGGCGAGUGAGGUCU CAUUGUUC | 3831 |
| 1771 | CUUUUGGG G CCCUUUCA | 1529 | UGAAAGGG GCCGAAAGGCGAGUGAGGUCU CCCAAAAG | 3832 |
| 1792 | GAAAUGGA G CUGUCUCU | 1530 | AGAGACAG GCCGAAAGGCGAGUGAGGUCU UCCAUUUC | 3833 |
| 1803 | GUCUCUCA G CGCUCCAU | 1531 | AUGGAGCG GCCGAAAGGCGAGUGAGGUCU UGAGAGAC | 3834 |
| 1815 | UCCAUCCA G CUUGAGAG | 1532 | CUCUCAAG GCCGAAAGGCGAGUGAGGUCU UGGAUGGA | 3835 |
| 1823 | GCUUGAGA G UAAGGGAU | 1533 | AUCCCUUA GCCGAAAGGCGAGUGAGGUCU UCUCAAGC | 3836 |
| 1847 | CCAGAACA G CCAGUGGA | 1534 | UCCACUGG GCCGAAAGGCGAGUGAGGUCU UGUUCUGG | 3837 |
| 1851 | AACAGCCA G UGGAUGAA | 1535 | UUCAUCCA GCCGAAAGGCGAGUGAGGUCU UGGCUGUU | 3838 |
| 1862 | GAUGAAUG G CACAGUGA | 1536 | UCACUGUG GCCGAAAGGCGAGUGAGGUCU CAUUCAUC | 3839 |
| 1867 | AUGGCACA G UGAUCGUG | 1537 | CACGAUCA GCCGAAAGGCGAGUGAGGUCU UGUGCCAU | 3840 |
| 1873 | CAGUGAUC G UGGACAGC | 1538 | GCUGUCCA GCCGAAAGGCGAGUGAGGUCU GAUCACUG | 3841 |
| 1880 | CGUGGACA G CACCGUGG | 1539 | CCACGGUG GCCGAAAGGCGAGUGAGGUCU UGUCCACG | 3842 |
| 1885 | ACAGCACC G UGGGAAAG | 1540 | CUUUCCCA GCCGAAAGGCGAGUGAGGUCU GGUGCUGU | 3843 |
| 1926 | ACAACGCA G CCUCCCCA | 1541 | UGGGGAGG GCCGAAAGGCGAGUGAGGUCU UGCGUUGU | 3844 |
| 1955 | GGAUCCCA G UGGACAGA | 1542 | UCUGUCCA GCCGAAAGGCGAGUGAGGUCU UGGGAUCC | 3845 |
| 1965 | GGACAGAA G CAAGGUGG | 1543 | CCACCUUG GCCGAAAGGCGAGUGAGGUCU UUCUGUCC | 3846 |
| 1970 | GAAGCAAG G UGGCUUUG | 1544 | CAAAGCCA GCCGAAAGGCGAGUGAGGUCU CUUGCUUC | 3847 |
| 1973 | GCAAGGUG G CUUUGUAG | 1545 | CUACAAAG GCCGAAAGGCGAGUGAGGUCU CACCUUGC | 3848 |
| 1981 | GCUUUGUA G UGGACAAA | 1546 | UUUGUCCA GCCGAAAGGCGAGUGAGGUCU UACAAAGC | 3849 |
| 2002 | CCAAAAUG G CCUACCUC | 1547 | GAGGUAGG GCCGAAAGGCGAGUGAGGUCU CAUUUUGG | 3850 |
| 2021 | AAUCCCAG G CAUUGCUA | 1548 | UAGCAAUG GCCGAAAGGCGAGUGAGGUCU CUGGGAUU | 3851 |
| 2032 | UUGCUAAG G UUGGCACU | 1549 | AGUGCCAA GCCGAAAGGCGAGUGAGGUCU CUUAGCAA | 3852 |
| 2036 | UAAGGUUG G CACUUGGA | 1550 | UCCAAGUG GCCGAAAGGCGAGUGAGGUCU CAACCUUA | 3853 |
| 2051 | GAAAUACA G UCUGCAAG | 1551 | CUUGCAGA GCCGAAAGGCGAGUGAGGUCU UGUAUUUC | 3854 |
| 2059 | GUCUGCAA G CAAGCUCA | 1552 | UGAGCUUG GCCGAAAGGCGAGUGAGGUCU UUGCAGAC | 3855 |
| 2063 | GCAAGCAA G CUCACAAA | 1553 | UUUGUGAG GCCGAAAGGCGAGUGAGGUCU UUGCUUGC | 3856 |
| 2091 | ACUGUCAC G UCCCGUGC | 1554 | GCACGGGA GCCGAAAGGCGAGUGAGGUCU GUGACAGU | 3857 |
| 2096 | CACGUCCC G UGCGUCCA | 1555 | UGGACGCA GCCGAAAGGCGAGUGAGGUCU GGGACGUG | 3858 |
| 2100 | UCCCGUGC G UCCAAUGC | 1556 | GCAUUGGA GCCGAAAGGCGAGUGAGGUCU GCACGGGA | 3859 |
| 2128 | CAAUUACA G UGACUUCC | 1557 | GGAAGUCA GCCGAAAGGCGAGUGAGGUCU UGUAAUUG | 3860 |
| 2156 | GGACACCA G CAAAUUCC | 1558 | GGAAUUUG GCCGAAAGGCGAGUGAGGUCU UGGUGUCC | 3861 |
| 2168 | AUUCCCCA G CCCUCUGG | 1559 | CCAGAGGG GCCGAAAGGCGAGUGAGGUCU UGGGGAAU | 3862 |
| 2176 | GCCCUCUG G UAGUUUAU | 1560 | AUAAACUA GCCGAAAGGCGAGUGAGGUCU CAGAGGGC | 3863 |
| 2179 | CUCUGGUA G UUUAUGCA | 1561 | UGCAUAAA GCCGAAAGGCGAGUGAGGUCU UACCAGAG | 3864 |
| 2203 | GCCAAGGA G CCUCCCCA | 1562 | UGGGGAGG GCCGAAAGGCGAGUGAGGUCU UCCUUGGC | 3865 |
| 2221 | UUCUCAGG G CCAGUGUC | 1563 | GACACUGG GCCGAAAGGCGAGUGAGGUCU CCUGAGAA | 3866 |
| 2225 | CAGGGCCA G UGUCACAG | 1564 | CUGUGACA GCCGAAAGGCGAGUGAGGUCU UGGCCCUG | 3867 |
| 2233 | GUGUCACA G CCCUGAUU | 1565 | AAUCAGGG GCCGAAAGGCGAGUGAGGUCU UGUGACAC | 3868 |
| 2248 | UUGAAUCA G UGAAUGGA | 1566 | UCCAUUCA GCCGAAAGGCGAGUGAGGUCU UGAUUCAA | 3869 |
| 2263 | GAAAAACA G UUACCUUG | 1567 | CAAGGUAA GCCGAAAGGCGAGUGAGGUCU UGUUUUUC | 3870 |
| 2290 | AUAAUGGA G CAGGUGCU | 1568 | AGCACCUG GCCGAAAGGCGAGUGAGGUCU UCCAUUAU | 3871 |
| 2294 | UGGAGCAG G UGCUGAUG | 1569 | CAUCAGCA GCCGAAAGGCGAGUGAGGUCU CUGCUCCA | 3872 |
| 2318 | GGAUGACG G UGUCUACU | 1570 | AGUAGACA GCCGAAAGGCGAGUGAGGUCU CGUCAUCC | 3873 |
| 2331 | UACUCAAG G UAUUUCAC | 1571 | GUGAAAUA GCCGAAAGGCGAGUGAGGUCU CUUGAGUA | 3874 |
| 2357 | CACGAAUG G UAGAUACA | 1572 | UGUAUCUA GCCGAAAGGCGAGUGAGGUCU CAUUCGUG | 3875 |
| 2366 | UAGAUACA G UGUAAAAG | 1573 | CUUUUACA GCCGAAAGGCGAGUGAGGUCU UGUAUCUA | 3876 |
| 2374 | GUGUAAAA G UGCGGGCU | 1574 | AGCCCGCA GCCGAAAGGCGAGUGAGGUCU UUUUACAC | 3877 |
| 2380 | AAGUGCGG G CUCUGGGA | 1575 | UCCCAGAG GCCGAAAGGCGAGUGAGGUCU CCGCACUU | 3878 |
| 2392 | UGGGAGGA G UUAACGCA | 1576 | UGCGUUAA GCCGAAAGGCGAGUGAGGUCU UCCUCCCA | 3879 |
| 2401 | UUAACGCA G CCAGACGG | 1577 | CCGUCUGG GCCGAAAGGCGAGUGAGGUCU UGCGUUAA | 3880 |
| 2413 | GACGGAGA G UGAUACCC | 1578 | GGGUAUCA GCCGAAAGGCGAGUGAGGUCU UCUCCGUC | 3881 |
| 2424 | AUACCCCA G CAGAGUGG | 1579 | CCACUCUG GCCGAAAGGCGAGUGAGGUCU UGGGGUAU | 3882 |
| 2429 | CCAGCAGA G UGGAGCAC | 1580 | GUGCUCCA GCCGAAAGGCGAGUGAGGUCU UCUGCUGG | 3883 |
| 2434 | AGAGUGGA G CACUGUAC | 1581 | GUACAGUG GCCGAAAGGCGAGUGAGGUCU UCCACUCU | 3884 |
| 2450 | CAUACCUG G CUGGAUUG | 1582 | CAAUCCAG GCCGAAAGGCGAGUGAGGUCU CAGGUAUG | 3885 |
| 2523 | CAACACAA G CAAGUGUG | 1583 | CACACUUG GCCGAAAGGCGAGUGAGGUCU UUGUGUUG | 3886 |
| 2527 | ACAAGCAA G UGUGUUEU | 1584 | GAAACACA GCCGAAAGGCGAGUGAGGUCU UUGCUUGU | 3887 |
| 2537 | GUGUUUCA G CAGAACAU | 1585 | AUGUUCUG GCCGAAAGGCGAGUGAGGUCU UGAAACAC | 3888 |
| 2555 | CUCGGGAG G CUCAUUUG | 1586 | CAAAUGAG GCCGAAAGGCGAGUGAGGUCU CUCCCGAG | 3889 |
| 2566 | CAUUUGUG G CUUCUGAU | 1587 | AUCAGAAG GCCGAAAGGCGAGUGAGGUCU CACAAAUG | 3890 |
| 2612 | CCCACCUG G CCAAAUCA | 1588 | UGAUUUGG GCCGAAAGGCGAGUGAGGUCU CAGGUGGG | 3891 |
| 2632 | ACCUGAAG G CGGAAAUU | 1589 | AAUUUCCG GCCGAAAGGCGAGUGAGGUCU CUUCAGGU | 3892 |
| 2648 | UCACGGGG G CAGUCUCA | 1590 | UGAGACUG GCCGAAAGGCGAGUGAGGUCU CCCCGUGA | 3893 |
| 2651 | CGGGGGCA G UCUCAUUA | 1591 | UAAUGAGA GCCGAAAGGCGAGUGAGGUCU UGCCCCCG | 3894 |
| 2674 | CUUGGACA G CUCCUGGG | 1592 | CCCAGGAG GCCGAAAGGCGAGUGAGGUCU UGUCCAAG | 3895 |
| 2704 | AUGGAACA G CUCACAAG | 1593 | CUUGUGAG GCCGAAAGGCGAGUGAGGUCU UGUUCCAU | 3896 |
| 2712 | GCUCACAA G UAUAUCAU | 1594 | AUGAUAUA GCCGAAAGGCGAGUGAGGUCU UUGUGAGC | 3897 |
| 2729 | UCGAAUAA G UACAAGUA | 1595 | UACUUGUA GCCGAAAGGCGAGUGAGGUCU UUAUUCGA | 3898 |
| 2735 | AAGUACAA G UAUUCUUG | 1596 | CAAGAAUA GCCGAAAGGCGAGUGAGGUCU UUGUACUU | 3899 |
| 2757 | AGAGACAA G UUCAAUGA | 1597 | UCAUUGAA GCCGAAAGGCGAGUGAGGUCU UUGUCUCU | 3900 |
| 2776 | CUCUUCAA G UGAAUACU | 1598 | AGUAUUCA GCCGAAAGGCGAGUGAGGUCU UUGAAGAG | 3901 |
| 2806 | CAAAGGAA G CCAACUCU | 1599 | AGAGUUGG GCCGAAAGGCGAGUGAGGUCU UUCCUUUG | 3902 |
| 2821 | CUGAGGAA G UCUUUUUG | 1600 | CAAAAAGA GCCGAAAGGCGAGUGAGGUCU UUCCUCAG | 3903 |
| 2861 | UGAAAAUG G CACAGAUC | 1601 | GAUCUGUG GCCGAAAGGCGAGUGAGGUCU CAUUUUCA | 3904 |
| 2887 | CUAUUCAG G CUGUUGAU | 1602 | AUCAACAG GCCGAAAGGCGAGUGAGGUCU CUGAAUAG | 3905 |
| 2899 | UUGAUAAG G UCGAUCUG | 1603 | CAGAUCGA GCCGAAAGGCGAGUGAGGUCU CUUAUCAA | 3906 |
| 2935 | UUGCACGA G UAUCUUUG | 1604 | CAAAGAUA GCCGAAAGGCGAGUGAGGUCU UCGUGCAA | 3907 |
| 2978 | GACACCUA G UCCUGAUG | 1605 | CAUCAGGA GCCGAAAGGCGAGUGAGGUCU UAGGUGUC | 3908 |
| 2991 | GAUGAAAC G UCUGCUCC | 1606 | GGAGCAGA GCCGAAAGGCGAGUGAGGUCU GUUUCAUC | 3909 |
| 3023 | UAUCAACA G CACCAUUC | 1607 | GAAUGGUG GCCGAAAGGCGAGUGAGGUCU UGUUGAUA | 3910 |
| 3035 | CAUUCCUG G CAUUCACA | 1068 | UGUGAAUG GCCGGAAAGGCGAGUGAGGUCU CAGGAAUG | 3911 |
| 3063 | AUGUGGAA G UGGAUAGG | 1609 | CCUAUCCA GCCGAAAGGCGGAGUGAGGUCU UUCCACAU | 3912 |
| 3081 | GAACUGCA G CUGUCAAU | 1610 | AUUGACAG GCCGAAAGGCGAGUGAGGUCU UGCAGUUC | 3913 |
| 3091 | UGUCAAUA G CCUAGGGC | 1611 | GCCCUAGG GCCGAAAGGCGAGUGAGGUCU UAUUGACA | 3914 |
| 3098 | AGCCUAGG G CUGAAUUU | 1612 | AAAUUCAG GCCGAAAGGCGAGUGAGGUCU CCUAGGCU | 3915 |
| 3189 | UGUAGGGG G CGAUAUAC | 1613 | GUAAUCG GCCGAAAGGCGAGUGAGGUCU CCCCUACA | 3916 |
| 3242 | UGUAGGGG G CGAUAUAC | 1613 | GUAUAUCG GCCGAAAGGCGAGUGAGGUCU CCCCUACA | 3916 |
| 3210 | UGUAUAUA G UACAUUUA | 1614 | UAAAUGUA GCCGAAAGGCGAGUGAGGUCU UAUAUACA | 3917 |
| 3279 | UGUAGGGG G CGAUAAAA | 1615 | UUUUAUCG GCCGAAAGGCGAGUGAGGUCU CCCCUACA | 3918 |

Input Sequence = NM_001285. Cut Site = G/Y
Arm Length = 8. Core Sequence = GCcgaaagGCGaGuCaaGGuCu
NM_001285 (Homo sapiens chloride channel, calcium activated, 1 (CLCA1) mRNA, 3311bp)

[0194] TABLE VII
Human CLCA1 DNAzyme and Target Sequence 249.021

| | | Seq | | Rz |
|---|---|---|---|---|
| | | ID | | Seq ID |
| Pos | Substrate | No | Dnazyme | No |
| 17 | CUUUUGGU A CAAAUGGA | 4 | TCCATTTG GGCTAGCTACAACGA ACCAAAAG | 3919 |
| 34 | UGUGGAAU A UAAUUGAA | 5 | TTCAATTA GGCTAGCTACAACGA ATTCCACA | 3920 |
| 44 | AAUUGAAU A UUUUCUUG | 8 | CAAGAAAA GGCTAGCTACAACGA ATTCAATT | 3921 |
| 84 | UUGAGGUU A UGUCAAGC | 19 | GCTTGACA GGCTAGCTACAACGA AACCTCAA | 3922 |
| 122 | AUGGAAAU A UUUACAAG | 22 | CTTGTAAA GGCTAGCTACAACGA ATTTCCAT | 3923 |
| 126 | AAAUAUUU A CAAGUACG | 25 | CGTACTTG GGCTAGCTACAACGA AAATATTT | 3924 |
| 132 | UUACAAGU A CGCAAUUU | 26 | AAATTGCG GGCTAGCTACAACGA ACTTGTAA | 3925 |
| 152 | ACUAAGAU A UUGUUAUC | 30 | GATAACAA GGCTAGCTACAACGA ATCTTAGT | 3926 |
| 158 | AUAUUGUU A UCAUUCUC | 33 | GAGAATGA GGCTAGCTACAACGA AACAATAT | 3927 |
| 169 | AUUCUCCU A UUGAAGAC | 38 | GTCTTCAA GGCTAGCTACAACGA AGGAGAAT | 3928 |
| 259 | GUGUGUCU A UAUUUUCA | 52 | TGAAAATA GGCTAGCTACAACGA AGACACAC | 3929 |
| 261 | GUGUCUAU A UUUUCAUA | 53 | TATGAAAA GGCTAGCTACAACGA ATAGACAC | 3930 |
| 269 | AUUUUCAU A UCUGUAUA | 58 | TATACAGA GGCTAGCTACAACGA ATGAAAAT | 3931 |
| 275 | AUAUCUGU A UAUAUAUA | 60 | TATATATA GGCTAGCTACAACGA ACAGATAT | 3932 |
| 277 | AUCUGUAU A UAUAUAAU | 61 | ATTATATA GGCTAGCTACAACGA ATACAGAT | 3933 |
| 279 | CUGUAUAU A UAUAAUGG | 62 | CCATTATA GGCTAGCTACAACGA ATATACAG | 3934 |
| 281 | GUAUAUAU A UAAUGGUA | 63 | TACCATTA GGCTAGCTACAACGA ATATATAC | 3935 |
| 346 | GGAGAUGU A CAGCAAUG | 74 | CATTGCTG GGCTAGCTACAACGA ACATCTCC | 3936 |
| 446 | CAAUGGCU A UGAAGGCA | 97 | TGCCTTCA GGCTAGCTACAACGA AGCCATTG | 3937 |
| 539 | AUCUCUGU A UCUGUUUG | 108 | CAAACAGA GGCTAGCTACAACGA ACAGAGAT | 3938 |
| 553 | UUGAAGCU A CAGGAAAG | 112 | CTTTCCTG GGCTAGCTACAACGA AGCTTCAA | 3939 |
| 569 | GCGAUUUU A UUUCAAAA | 116 | TTTTGAAA GGCTAGCTACAACGA AAAATCGC | 3940 |
| 623 | GGCUGACU A UGUGAGAC | 126 | GTCTCACA GGCTAGCTACAACGA AGTCAGCC | 3941 |
| 647 | UGAGACCU A CAAAAAUG | 128 | CATTTTTG GGCTAGCTACAACGA AGGTCTCA | 3942 |
| 679 | CUGAGUCU A CUCCUCCA | 133 | TGGAGGAG GGCTAGCTACAACGA AGACTCAG | 3943 |
| 704 | UGAACCCU A CACUGAGC | 137 | GCTCAGTG GGCTAGCTACAACGA AGGGTTCA | 3944 |
| 791 | AGCUGAAU A UGGACCAC | 147 | GTGGTCCA GGCTAGCTACAACGA ATTCAGCT | 3945 |
| 834 | GCUCAUCU A CGAUGGGG | 154 | CCCCATCG GGCTAGCTACAACGA AGATGAGC | 3946 |
| 846 | UGGGGAGU A UUUGACGA | 155 | TCGTCAAA GGCTAGCTACAACGA ACTCCCCA | 3947 |
| 857 | UGACGAGU A CAAUAAUG | 158 | CATTATTG GGCTAGCTACAACGA ACTCGTCA | 3948 |
| 878 | GAAAUUCU A CUUAUCCA | 162 | TGGATAAG GGCTAGCTACAACGA AGAATTTC | 3949 |
| 882 | UUCUACUU A UCCAAUGG | 164 | CCATTGGA GGCTAGCTACAACGA AAGTAGAA | 3950 |
| 897 | GGAAGAAU A CAAGCAGU | 166 | ACTGCTTG GGCTAGCTACAACGA ATTCTTCC | 3951 |
| 922 | CAGCAGGU A UUACUGGU | 170 | ACCAGTAA GGCTAGCTACAACGA ACCTGCTG | 3952 |
| 925 | CAGGUAUU A CUGGUACA | 172 | TGTACCAG GGCTAGCTACAACGA AATACCTG | 3953 |
| 931 | UUACUGGU A CAAAUGUA | 173 | TACATTTG GGCTAGCTACAACGA ACCAGTAA | 3954 |
| 968 | CAGCUGUU A CACCAAAA | 178 | TTTTGGTG GGCTAGCTACAACGA AACAGCTG | 3955 |
| 997 | AUAAAGUU A CAGGACUC | 183 | GAGTCCTG GGCTAGCTACAACGA AACTTTAT | 3956 |
| 1007 | AGGACUCU A UGAAAAAG | 185 | CTTTTTCA GGCTAGCTACAACGA AGAGTCCT | 3957 |
| 1060 | AGGCUUCU A UAAUGUUU | 194 | AAACATTA GGCTAGCTACAACGA AGAAGCCT | 3958 |
| 1087 | UUGAUUCU A UAGUUGAA | 201 | TTCAACTA GGCTAGCTACAACGA AGAATCAA | 3959 |
| 1102 | AAUUCUGU A CAGAACAA | 206 | TTGTTCTG GGCTAGCTACAACGA ACAGAATT | 3960 |
| 1213 | CCACUCCU A UGACAACA | 218 | TGTTGTCA GGCTAGCTACAACGA AGGAGTGG | 3961 |
| 1416 | GCCCAUGU A CAAAGUGA | 245 | TCACTTTG GGCTAGCTACAACGA ACATGGGC | 3962 |
| 1431 | GAACUCAU A CAGAUAAA | 247 | TTTATCTG GGCTAGCTACAACGA ATGAGTTC | 3963 |
| 1476 | AAAAGAUU A CCUGCAGC | 251 | GCTGCAGG GGCTAGCTACAACGA AATCTTTT | 3964 |
| 1531 | CGGCAUUU A CUGUGAUU | 261 | AATCACAG GGCTAGCTACAACGA AAATGCCG | 3965 |
| 1550 | GAAGAAAU A UCCAACUG | 264 | CAGTTGGA GGCTAGCTACAACGA ATTTCTTC | 3966 |
| 1603 | ACAACACU A UAAGUGGG | 268 | CCCACTTA GGCTAGCTACAACGA AGTGTTGT | 3967 |
| 1716 | GGAGGUUU A CAGACAUA | 285 | TATGTCTG GGCTAGCTACAACGA AAACCTCC | 3968 |
| 1724 | ACAGACAU A UGCUUCAG | 286 | CTGAAGCA GGCTAGCTACAACGA ATGTCTGT | 3969 |
| 1909 | UGUUUCUU A UCACCUGG | 318 | CCAGGTGA GGCTAGCTACAACGA AAGAAACA | 3970 |
| 2006 | AAUGGCCU A CCUCCAAA | 329 | TTTGGAGG GGCTAGCTACAACGA AGGCCATT | 3971 |
| 2048 | UUGGAAAU A CAGUCUGC | 336 | GCAGACTG GGCTAGCTACAACGA ATTTCCAA | 3972 |
| 2110 | CCAAUGCU A CCCUGCCU | 343 | AGGCAGGG GGCTAGCTACAACGA AGCATTGG | 3973 |
| 2125 | CUCCAAUU A CAGUGACU | 346 | AGTCACTG GGCTAGCTACAACGA AATTGGAG | 3974 |
| 2183 | GGUAGUUU A UGCAAAUA | 355 | TATTTGCA GGCTAGCTACAACGA AAACTACC | 3975 |
| 2191 | AUGCAAAU A UUCGCCAA | 356 | TTGGCGAA GGCTAGCTACAACGA ATTTGCAT | 3976 |
| 2266 | AAACAGUU A CCUUGGAA | 367 | TTCCAAGG GGCTAGCTACAACGA AACTGTTT | 3977 |
| 2277 | UUGGAACU A CUGGAUAA | 369 | TTATCCAG GGCTAGCTACAACGA AGTTCCAA | 3978 |
| 2305 | CUGAUGCU A CUAAGGAU | 371 | ATCCTTAG GGCTAGCTACAACGA AGCATCAG | 3979 |
| 2324 | CGGUGUCU A CUCAAGGU | 374 | ACCTTGAG GGCTAGCTACAACGA AGACACCG | 3980 |
| 2333 | CUCAAGGU A UUUCACAA | 376 | TTGTGAAA GGCTAGCTACAACGA ACCTTGAG | 3981 |
| 2345 | CACAACUU A UGACACGA | 381 | TCGTGTCA GGCTAGCTACAACGA AAGTTGTG | 3982 |
| 2363 | UGGUAGAU A CAGUGUAA | 383 | TTACACTG GGCTAGCTACAACGA ATCTACCA | 3983 |
| 2418 | AGAGUGAU A CCCCAGCA | 388 | TGCTGGGG GGCTAGCTACAACGA ATCACTCT | 3984 |
| 2441 | AGCACUGU A CAUACCUG | 389 | CAGGTATG GGCTAGCTACAACGA ACAGTGCT | 3985 |
| 2445 | CUGUACAU A CCUGGCUG | 390 | CAGCCAGG GGCTAGCTACAACGA ATGTACAG | 3986 |
| 2472 | GAUGAAAU A CAAUGGAA | 392 | TTCCATTG GGCTAGCTACAACGA ATTTCATC | 3987 |
| 2592 | GCUCCCAU A CCUGAUCU | 411 | AGATCAGG GGCTAGCTACAACGA ATGGGAGC | 3988 |
| 2690 | GGAUGAUU A UGACCAUG | 427 | CATGGTCA GGCTAGCTACAACGA AATCATCC | 3989 |
| 2714 | UCACAAGU A UAUCAUUC | 429 | GAATGATA GGCTAGCTACAACGA ACTTGTGA | 3990 |
| 2716 | ACAAGUAU A UCAUUCGA | 430 | TCGAATGA GGCTAGCTACAACGA ATACTTGT | 3991 |
| 2731 | GAAUAAGU A CAAGUAUU | 435 | AATACTTG GGCTAGCTACAACGA ACTTATTC | 3992 |
| 2737 | GUACAAGU A UUCUUGAU | 436 | ATCAAGAA GGCTAGCTACAACGA ACTTGTAC | 3993 |
| 2782 | AAGUGAAU A CUACUGCU | 448 | AGCAGTAG GGCTAGCTACAACGA ATTCACTT | 3994 |
| 2785 | UGAAUACU A CUGCUCUC | 449 | GAGAGCAG GGCTAGCTACAACGA AGTATTCA | 3995 |
| 2848 | AAAACAUU A CUUUUGAA | 463 | TTCAAAAG GGCTAGCTACAACGA AATGTTTT | 3996 |
| 2881 | UCAUUGCU A UUCAGGCU | 473 | AGCCTGAA GGCTAGCTACAACGA AGCAATGA | 3997 |
| 2919 | UCAGAAAU A UCCAACAU | 481 | ATGTTGGA GGCTAGCTACAACGA ATTTCTGA | 3998 |
| 2937 | GCACGAGU A UCUUUGUU | 484 | AACAAAGA GGCTAGCTACAACGA ACTCGTGC | 3999 |
| 2947 | CUUUGUUU A UUCCUCCA | 490 | TGGAGGAA GGCTAGCTACAACGA AAACAAAG | 4000 |
| 3010 | GUCCUAAU A UUCAUAUC | 502 | GATATGAA GGCTAGCTACAACGA ATTAGGAC | 4001 |
| 3016 | AUAUUCAU A UCAACAGC | 505 | GCTGTTGA GGCTAGCTACAACGA ATGAATAT | 4002 |
| 3055 | UAAAAAUU A UGUGGAAG | 516 | CTTCCACA GGCTAGCTACAACGA AATTTTTA | 4003 |
| 3149 | UUUUGAUU A UAAAAUUU | 540 | AAATTTTA GGCTAGCTACAACGA AATCAAAA | 4004 |
| 3168 | UAAAAUGU A UUUUAGAC | 547 | GTCTAAAA GGCTAGCTACAACGA ACATTTTA | 4005 |
| 3194 | GGGGCGAU A UACUAAAU | 555 | ATTTAGTA GGCTAGCTACAACGA ATCGCCCC | 4006 |
| 3247 | GGGGCGAU A UACUAAAU | 555 | ATTTAGTA GGCTAGCTACAACGA ATCGCCCC | 4006 |
| 3196 | GGCGAUAU A CUAAAUGU | 556 | ACATTTAG GGCTAGCTACAACGA ATATCGCC | 4007 |
| 3249 | GGCGAUAU A CUAAAUGU | 556 | ACATTTAG GGCTAGCTACAACGA ATATCGCC | 4007 |
| 3205 | CUAAAUGU A UAUAGUAC | 558 | GTACTATA GGCTAGCTACAACGA ACATTTAG | 4008 |
| 3207 | AAAUGUAU A UAGUACAU | 559 | ATGTACTA GGCTAGCTACAACGA ATACATTT | 4009 |
| 3212 | UAUAUAGU A CAUUUAUA | 561 | TATAAATG GGCTAGCTACAACGA ACTATATA | 4010 |
| 3218 | GUACAUUU A UACUAAAU | 564 | ATTTAGTA GGCTAGCTACAACGA AAATGTAC | 4011 |
| 3220 | ACAUUUAU A CUAAAUGU | 565 | ACATTTAG GGCTAGCTACAACGA ATAAATGT | 4012 |
| 3229 | CUAAAUGU A UUCCUGUA | 567 | TACAGGAA GGCTAGCTACAACGA ACATTTAG | 4013 |
| 3258 | CUAAAUGU A UUUUAGAC | 572 | GTCTAAAA GGCTAGCTACAACGA ACATTTAG | 4014 |
| 65 | AGGGGAGC A UGAAGAGG | 579 | CCTCTTCA GGCTAGCTACAACGA GCTCCCCT | 4015 |
| 93 | UGUCAAGC A UCUGGCAC | 581 | GTGCCAGA GGCTAGCTACAACGA GCTTGACA | 4016 |
| 100 | CAUCUGGC A CAGCUGAA | 583 | TTCAGCTG GGCTAGCTACAACGA GCCAGATG | 4017 |
| 161 | UUGUUAUC A UUCUCCUA | 590 | TAGGAGAA GGCTAGCTACAACGA GATAACAA | 4018 |
| 195 | AGUAAAAC A CAUCAGGU | 596 | ACCTGATG GGCTAGCTACAACGA GTTTTACT | 4019 |
| 197 | UAAAACAC A UCAGGUCA | 597 | TGACCTGA GGCTAGCTACAACGA GTGTTTTA | 4020 |
| 231 | GAUAAACC A CUUCCGAU | 603 | ATCGGAAG GGCTAGCTACAACGA GGTTTATC | 4021 |
| 267 | AUAUUUUC A UAUCUGUA | 607 | TACAGATA GGCTAGCTACAACGA GAAAATAT | 4022 |
| 299 | AGAAAGAC A CCUUCGUA | 609 | TACGAAGG GGCTAGCTACAACGA GTCTTTCT | 4023 |
| 314 | UAACCCGC A UUUUCCAA | 614 | TTGGAAAA GGCTAGCTACAACGA GCGGGTTA | 4024 |
| 334 | GAGGAAUC A CAGGGAGA | 617 | TCTCCCTG GGCTAGCTACAACGA GATTCCTC | 4025 |
| 360 | AUGGGGCC A UUUAAGAG | 622 | CTCTTAAA GGCTAGCTACAACGA GGCCCCAT | 4026 |
| 379 | CUGUGUUC A UCUUGAUU | 624 | AATCAAGA GGCTAGCTACAACGA GAACACAG | 4027 |
| 392 | GAUUCUUC A CCUUCUAG | 627 | CTAGAAGG GGCTAGCTACAACGA GAAGAATC | 4028 |
| 420 | AGUAAUUC A CUCAUUCA | 634 | TGAATGAG GGCTAGCTACAACGA GAATTACT | 4029 |
| 424 | AUUCACUC A UUCAGCUG | 636 | CAGCTGAA GGCTAGCTACAACGA GAGTGAAT | 4030 |
| 454 | AUGAAGGC A UUGUCGUU | 642 | AACGACAA GGCTAGCTACAACGA GCCTTCAT | 4031 |
| 495 | GAUGAAAC A CUCAUUCA | 650 | TGAATGAG GGCTAGCTACAACGA GTTTCATC | 4032 |
| 499 | AAACACUC A UUCAACAA | 652 | TTGTTGAA GGCTAGCTACAACGA GAGTGTTT | 4033 |
| 517 | UAAAGGAC A UGGUGACC | 655 | GGTCACCA GGCTAGCTACAACGA GTCCTTTA | 4034 |
| 531 | ACCCAGGC A UCUCUGUA | 659 | TACAGAGA GGCTAGCTACAACGA GCCTGGGT | 4035 |
| 586 | AUGUUGCC A UUUUGAUU | 667 | AATCAAAA GGCTAGCTACAACGA GGCAACAT | 4036 |
| 603 | CCUGAAAC A UGGAAGAC | 670 | GTCTTCCA GGCTAGCTACAACGA GTTTCAGG | 4037 |
| 706 | AACCCUAC A CUGAGCAG | 692 | CTGCTCAG GGCTAGCTACAACGA GTAGGGTT | 4038 |
| 749 | AAGGAUCC A CCUCACUC | 698 | GAGTGAGG GGCTAGCTACAACGA GGATCCTT | 4039 |
| 754 | UCCACCUC A CUCCUGAU | 701 | ATCAGGAG GGCTAGCTACAACGA GAGGTGGA | 4040 |
| 766 | CUGAUUUC A UUGCAGGA | 705 | TCCTGCAA GGCTAGCTACAACGA GAAATCAG | 4041 |
| 798 | UAUGGACC A CAAGGUAA | 709 | TTACCTTG GGCTAGCTACAACGA GGTCCATA | 4042 |
| 810 | GGUAAGGC A UUUGUCCA | 711 | TGGACAAA GGCTAGCTACAACGA GCCTTACC | 4043 |
| 818 | AUUUGUCC A UGAGUGGG | 713 | CCCACTCA GGCTAGCTACAACGA GGACAAAT | 4044 |
| 830 | GUGCGCUC A UCUACGAU | 715 | ATCGTAGA GGCTAGCTACAACGA GAGCCCAC | 4045 |
| 970 | GCUGUUAC A CCAAAAGA | 731 | TCTTTTGG GGCTAGCTACAACGA GTAACAGC | 4046 |
| 982 | AAAGAUGC A CAUUCAAU | 734 | ATTGAATG GGCTAGCTACAACGA GCATCTTT | 4047 |
| 984 | AGAUGCAC A UUCAAUAA | 735 | TTATTGAA GGCTAGCTACAACGA GTGCATCT | 4048 |
| 1071 | AUGUUUGC A CAACAUGU | 749 | ACATGTTG GGCTAGCTACAACGA GCAAACAT | 4049 |
| 1076 | UGCACAAC A UGUUGAUU | 751 | AATCAACA GGCTAGCTACAACGA GTTGTGCA | 4050 |
| 1115 | ACAAAACC A CAACAAAG | 757 | CTTTGTTG GGCTAGCTACAACGA GGTTTTGT | 4051 |
| 1165 | UCCGAAGC A CAUGGGAA | 769 | TTCCCATG GGCTAGCTACAACGA GCTTCGGA | 4052 |
| 1167 | CGAAGCAC A UGGGAAGU | 770 | ACTTCCCA GGCTAGCTACAACGA GTGCTTCG | 4053 |
| 1207 | AGAAAACC A CUCCUAUG | 775 | CATAGGAG GGCTAGCTACAACGA GGTTTTCT | 4054 |
| 1221 | AUGACAAC A CAGCCACC | 780 | GGTGGCTG GGCTAGCTACAACGA GTTGTCAT | 4055 |
| 1227 | ACACAGCC A CCAAAUCC | 783 | GGATTTGG GGCTAGCTACAACGA GGCTGTGT | 4056 |
| 1237 | CAAAUCCC A CCUUCUCA | 788 | TGAGAAGG GGCTAGCTACAACGA GGGATTTG | 4057 |
| 1245 | ACCUUCUC A UUGCUGCA | 792 | TGCAGCAA GGCTAGCTACAACGA GAGAAGGT | 4058 |
| 1300 | CUGGAAGC A UGGCGACU | 800 | AGTCGCCA GGCTAGCTACAACGA GCTTCCAG | 4059 |
| 1395 | AUGGUGAC A UUUGACAG | 820 | CTGTCAAA GGCTAGCTACAACGA GTCACCAT | 4060 |
| 1412 | UGCUGCCC A UGUACAAA | 825 | TTTGTACA GGCTAGCTACAACGA GGGCAGCA | 4061 |
| 1429 | GUGAACUC A UACAGAUA | 828 | TATCTGTA GGCTAGCTACAACGA GAGTTCAC | 4062 |
| 1459 | ACAGGGAC A CACUCGCC | 833 | GGCGAGTG GGCTAGCTACAACGA GTCCCTGT | 4063 |
| 1461 | AGGGACAC A CUCGCCAA | 834 | TTGGCGAG GGCTAGCTACAACGA GTGTCCCT | 4064 |
| 1504 | GGACGUCC A UCUGCAGC | 845 | GCTGCAGA GGCTAGCTACAACGA GGACGTCC | 4065 |
| 1527 | CGAUCGGC A UUUACUGU | 849 | ACAGTAAA GGCTAGCTACAACGA GCCGATCG | 4066 |
| 1600 | AAGACAAC A CUAUAAGU | 858 | ACTTATAG GGCTAGCTACAACGA GTTGTCTT | 4067 |
| 1642 | GUGGUGCC A UCAUCCAC | 864 | GTGGATGA GGCTAGCTACAACGA GGCACCAC | 4068 |
| 1645 | GUGCCAUC A UCCACACA | 865 | TGTGTGGA GGCTAGCTACAACGA GATGGCAC | 4069 |
| 1649 | CAUCAUCC A CACAGUCG | 867 | CGACTGTG GGCTAGCTACAACGA GGATGATG | 4070 |
| 1651 | UCAUCCAC A CAGUCGCU | 868 | AGCGACTG GGCTAGCTACAACGA GTGGATGA | 4071 |
| 1722 | UUACAGAC A UAUGCUUC | 884 | GAAGCATA GGCTAGCTACAACGA GTCTGTAA | 4072 |
| 1756 | AUGGCCUC A UUGAUGCU | 892 | AGCATCAA GGCTAGCTACAACGA GAGGCCAT | 4073 |
| 1779 | GCCCUUUC A UCAGGAAA | 897 | TTTCCTGA GGCTAGCTACAACGA GAAAGGGC | 4074 |
| 1810 | AGCGCUCC A UCCAGCUU | 905 | AAGCTGGA GGCTAGCTACAACGA GGAGCGCT | 4075 |
| 1864 | UGAAUGGC A CAGUGAUC | 917 | GATCACTG GGCTAGCTACAACGA GCCATTCA | 4076 |
| 1882 | UGGACAGC A CCGUGGGA | 920 | TCCCACGG GGCTAGCTACAACGA GCTGTCCA | 4077 |
| 1897 | GAAAGGAC A CUUUGUUU | 922 | AAACAAAG GGCTAGCTACAACGA GTCCTTTC | 4078 |
| 1912 | UUCUUAUC A CCUGGACA | 925 | TGTCCAGG GGCTAGCTACAACGA GATAAGAA | 4079 |
| 1993 | ACAAAAAC A CCAAAAUG | 947 | CATTTTGG GGCTAGCTACAACGA GTTTTTGT | 4080 |
| 2023 | UCCCAGGC A UUGCUAAG | 959 | CTTAGCAA GGCTAGCTACAACGA GCCTGGGA | 4081 |
| 2038 | AGGUUGGC A CUUGGAAA | 961 | TTTCCAAG GGCTAGCTACAACGA GCCAACCT | 4082 |
| 2067 | GCAAGCUC A CAAACCUU | 968 | AAGGTTTG GGCTAGCTACAACGA GAGCTTGC | 4083 |
| 2089 | UGACUGUC A CGUCCCGU | 976 | ACGGGACG GGCTAGCTACAACGA GACAGTCA | 4084 |
| 2152 | ACAAGGAC A CCAGCAAA | 994 | TTTGCTGG GGCTAGCTACAACGA GTCCTTGT | 4085 |
| 2230 | CCAGUGUC A CAGCCCUG | 1019 | CAGGGCTG GGCTAGCTACAACGA GACACTGG | 4086 |
| 2338 | GGUAUUUC A CAACUUAU | 1037 | ATAAGTTG GGCTAGCTACAACGA GAAATACC | 4087 |
| 2350 | CUUAUGAC A CGAAUGGU | 1040 | ACCATTCG GGCTAGCTACAACGA GTCATAAG | 4088 |
| 2436 | AGUGGAGC A CUGUACAU | 1052 | ATGTACAG GGCTAGCTACAACGA GCTCCACT | 4089 |
| 2443 | CACUGUAC A UACCUGGC | 1054 | GCCAGGTA GGCTAGCTACAACGA GTACAGTG | 4090 |
| 2484 | UGGAAUCC A CCAAGACC | 1060 | GGTCTTGG GGCTAGCTACAACGA GGATTCCA | 4091 |
| 2519 | UGUUCAAC A CAAGCAAG | 1066 | CTTGCTTG GGCTAGCTACAACGA GTTGAACA | 4092 |
| 2544 | AGCAGAAC A UCCUCGGG | 1071 | CCCGAGGA GGCTAGCTACAACGA GTTCTGCT | 4093 |
| 2559 | GGAGGCUC A UUUGUGGC | 1075 | GCCACAAA GGCTAGCTACAACGA GAGCCTCC | 4094 |
| 2590 | AUGCUCCC A UACCUGAU | 1084 | ATCAGGTA GGCTAGCTACAACGA GGGAGCAT | 4095 |
| 2607 | CUCUUCCC A CCUGGCCA | 1091 | TGGCCAGG GGCTAGCTACAACGA GGGAAGAG | 4096 |
| 2620 | GCCAAAUC A CCGACCUG | 1096 | CAGGTCGG GGCTAGCTACAACGA GATTTGGC | 4097 |
| 2642 | GGAAAUUC A CGGGGGCA | 1100 | TGCCCCCG GGCTAGCTACAACGA GAATTTCC | 4098 |
| 2656 | GCAGUCUC A UUAAUCUG | 1103 | CAGATTAA GGCTAGCTACAACGA GAGACTGC | 4099 |
| 2696 | UUAUGACC A UGGAACAG | 1111 | CTGTTCCA GGCTAGCTACAACGA GGTCATAA | 4100 |
| 2708 | AACAGCUC A CAAGUAUA | 1114 | TATACTTG GGCTAGCTACAACGA GAGCTGTT | 4101 |
| 2719 | AGUAUAUC A UUCGAAUA | 1116 | TATTCGAA GGCTAGCTACAACGA GATATACT | 4102 |
| 2794 | CUGCUCUC A UCCCAAAG | 1130 | CTTTGGGA GGCTAGCTACAACGA GAGAGCAG | 4103 |
| 2845 | CAGAAAAC A UUACUUUU | 1141 | AAAAGTAA GGCTAGCTACAACGA GTTTTCTG | 4104 |
| 2863 | AAAAUGGC A CAGAUCUU | 1143 | AAGATCTG GGCTAGCTACAACGA GCCATTTT | 4105 |
| 2875 | AUCUUUUC A UUGCUAUU | 1146 | AATAGCAA GGCTAGCTACAACGA GAAAAGAT | 4106 |
| 2926 | UAUCCAAC A UUGCACCA | 1154 | TCGTGCAA GGCTAGCTACAACGA GTTGGATA | 4107 |
| 2931 | AACAUUGC A CGAGUAUC | 1155 | GATACTCG GGCTAGCTACAACGA GCAATGTT | 4108 |
| 2955 | AUUCCUCC A CAGACUCC | 1160 | GGAGTCTG GGCTAGCTACAACGA GGAGGAAT | 4109 |
| 2973 | CCAGAGAC A CCUAGUCC | 1166 | GGACTAGG GGCTAGCTACAACGA GTCTCTGG | 4110 |
| 3014 | UAAUAUUC A UAUCAACA | 1177 | TGTTGATA GGCTAGCTACAACGA GAATATTA | 4111 |
| 3025 | UCAACAGC A CCAUUCCU | 1180 | AGGAATGG GGCTAGCTACAACGA GCTGTTGA | 4112 |
| 3028 | ACAGCACC A UUCCUGGC | 1182 | GCCAGGAA GGCTAGCTACAACGA GGTGCTGT | 4113 |
| 3037 | UUCCUGGC A UUCACAUU | 1185 | AATGTGAA GGCTAGCTACAACGA GCCAGGAA | 4114 |
| 3041 | UGGCAUUC A CAUUUUAA | 1186 | TTAAAATG GGCTAGCTACAACGA GAATGCCA | 4115 |
| 3043 | GCAUUCAC A UUUUAAAA | 1187 | TTTTAAAA GGCTAGCTACAACGA GTGAATGC | 4116 |
| 3130 | AAUAAAUC A UUCAUCCU | 1196 | AGGATGAA GGCTAGCTACAACGA GATTTATT | 4117 |
| 3134 | AAUCAUUC A UCCUUUUU | 1197 | AAAAAGGA GGCTAGCTACAACGA GAATGATT | 4118 |
| 3214 | UAUAGUAC A UUUAUACU | 1205 | AGTATAAA GGCTAGCTACAACGA GTACTATA | 4119 |
| 134 | ACAAGUAC G CAAUUUGA | 1215 | TCAAATTG GGCTAGCTACAACGA GTACTTGT | 4120 |
| 312 | CGUAACCC G CAUUUUCC | 1220 | GGAAAATG GGCTAGCTACAACGA GGGTTACG | 4121 |
| 463 | UUGUCGUU G CAAUCGAC | 1225 | GTCGATTG GGCTAGCTACAACGA AACGACAA | 4122 |
| 480 | CCCAAUGU G CCAGAAGA | 1227 | TCTTCTGG GGCTAGCTACAACGA ACATTGGG | 4123 |
| 583 | AAAAUGUU G CCAUUUUG | 1232 | CAAAATGG GGCTAGCTACAACGA AACATTTT | 4124 |
| 655 | ACAAAAAU G CUGAUGUU | 1238 | AACATCAG GGCTAGCTACAACGA ATTTTTGT | 4125 |
| 670 | UUCUGGUU G CUGAGUCU | 1240 | AGACTCAG GGCTAGCTACAACGA AACCAGAA | 4126 |
| 769 | AUUUCAUU G CAGGAAAA | 1247 | TTTTCCTG GGCTAGCTACAACGA AATGAAAT | 4127 |
| 980 | CAAAAGAU G CACAUUCA | 1255 | TGAATGTG GGCTAGCTACAACGA ATCTTTTG | 4128 |
| 1040 | CCAAUCCC G CCAGACGG | 1258 | CCGTCTGG GGCTAGCTACAACGA GGGATTGG | 4129 |
| 1069 | UAAUGUUU G CACAACAU | 1259 | ATGTTGTG GGCTAGCTACAACGA AAACATTA | 4130 |
| 1151 | UCAAAAAU G CAAUCUCC | 1262 | GGAGATTG GGCTAGCTACAACGA ATTTTTGA | 4131 |
| 1248 | UUCUCAUU G CUGCAGAU | 1268 | ATCTGCAG GGCTAGCTACAACGA AATGAGAA | 4132 |
| 1251 | UCAUUGCU G CAGAUUGG | 1269 | CCAATCTG GGCTAGCTACAACGA AGCAATGA | 4133 |
| 1316 | UGGUAACC G CCUCAAUC | 1272 | GATTGAGG GGCTAGCTACAACGA GGTTACCA | 4134 |
| 1353 | CUUUUCCU G CUGCAGAC | 1275 | GTCTGCAG GGCTAGCTACAACGA AGGAAAAG | 4135 |
| 1356 | UUCCUGCU G CAGACAGU | 1276 | ACTGTCTG GGCTAGCTACAACGA AGCAGGAA | 4136 |
| 1405 | UUGACAGU G CUGCCCAU | 1280 | ATGGGCAG GGCTAGCTACAACGA ACTGTCAA | 4137 |
| 1408 | ACAGUGCU G CCCAUGUA | 1281 | TACATGGG GGCTAGCTACAACGA AGCACTGT | 4138 |
| 1465 | ACACACUC G CCAAAAGA | 1284 | TCTTTTGG GGCTAGCTACAACGA GAGTGTGT | 4139 |
| 1480 | GAUUACCU G CAGCAGCU | 1285 | AGCTGCTG GGCTAGCTACAACGA AGGTAATC | 4140 |
| 1508 | GUCCAUCU G CAGCGGGC | 1286 | GCCCGCTG GGCTAGCTACAACGA AGATGGAC | 4141 |
| 1575 | GAAAUUGU G CUGCUGAC | 1291 | GTCAGCAG GGCTAGCTACAACGA ACAATTTC | 4142 |
| 1578 | AUUGUGCU G CUGACGGA | 1292 | TCCGTCAG GGCTAGCTACAACGA AGCACAAT | 4143 |
| 1613 | AAGUGGGU G CUUUAACG | 1294 | CGTTAAAG GGCTAGCTACAACGA ACCCACTT | 4144 |
| 1639 | AAAGUGGU G CCAUCAUC | 1296 | GATGATGG GGCTAGCTACAACGA ACCACTTT | 4145 |
| 1657 | ACACAGUC G CUUUGGGG | 1297 | CCCCAAAG GGCTAGCTACAACGA GACTGTGT | 4146 |
| 1672 | GGCCCUCU G CAGCUCAA | 1298 | TTGAGCTG GGCTAGCTACAACGA AGAGGGCC | 4147 |
| 1726 | AGACAUAU G CUUCAGAU | 1300 | ATCTGAAG GGCTAGCTACAACGA ATATGTCT | 4148 |
| 1762 | UCAUUGAU G CUUUUGGG | 1302 | CCCAAAAG GGCTAGCTACAACGA ATCAATGA | 4149 |
| 1805 | CUCUCAGC G CUCCAUCC | 1303 | GGATGGAG GGCTAGCTACAACGA GCTGAGAG | 4150 |
| 1923 | UGGACAAC G CAGCCUCC | 1307 | GGAGGCTG CGCTAGCTACAACGA GTTGTCCA | 4151 |
| 2026 | CAGGCAUU G CUAAGGUU | 1308 | AACCTTAG GGCTAGCTACAACGA AATGCCTG | 4152 |
| 2055 | UACAGUCU G CAAGCAAG | 1309 | CTTGCTTG GGCTAGCTACAACGA AGACTGTA | 4153 |
| 2098 | CGUCCCGU G CGUCCAAU | 1312 | ATTGGACG GGCTAGCTACAACGA ACGGGACG | 4154 |
| 2107 | CGUCCAAU G CUACCCUG | 1313 | CAGGGTAG GGCTAGCTACAACGA ATTGGACG | 4155 |
| 2115 | GCUACCCU G CCUCCAAU | 1314 | ATTGGAGG GGCTAGCTACAACGA AGGGTAGC | 4156 |
| 2185 | UAGUUUAU G CAAAUAUU | 1317 | AATATTTG GGCTAGCTACAACGA ATAAACTA | 4157 |
| 2195 | AAAUAUUC G CCAAGGAG | 1318 | CTCCTTGG GGCTAGCTACAACGA GAATATTT | 4158 |
| 2296 | GAGCAGGU G CUGAUGCU | 1322 | AGCATCAG GGCTAGCTACAACGA ACCTGCTC | 4159 |
| 2302 | GUGCUGAU G CUACUAAG | 1324 | CTTAGTAG GGCTAGCTACAACGA ATCAGCAC | 4160 |
| 2376 | GUAAAAGU G CGGGCUCU | 1328 | AGAGCCCG GGCTAGCTACAACGA ACTTTTAC | 4161 |
| 2398 | GAGUUAAC G CAGCCAGA | 1329 | TCTGGCTG GGCTAGCTACAACGA GTTAACTC | 4162 |
| 2584 | UCCCAAAU G CUCCCAUA | 1337 | TATGGGAG GGCTAGCTACAACGA ATTTGGGA | 4163 |
| 2788 | AUACUACU G CUCUCAUC | 1348 | GATGAGAG GGCTAGCTACAACGA AGTAGTAT | 4164 |
| 2878 | UUUUCAUU G CUAUUCAG | 1351 | CTGAATAG GGCTAGCTACAACGA AATGAAAA | 4165 |
| 2929 | CCAACAUU G CACGAGUA | 1355 | TACTCGTG GGCTAGCTACAACGA AATGTTGG | 4166 |
| 2964 | CAGACUCC G CCAGAGAC | 1357 | GTCTCTGG GGCTAGCTACAACGA GGAGTCTG | 4167 |
| 2995 | AAACGUCU G CUCCUUGU | 1360 | ACAAGGAG GGCTAGCTACAACGA AGACGTTT | 4168 |
| 3078 | GGAGAACU G CAGCUGUC | 1361 | GACAGCTG GGCTAGCTACAACGA AGTTCTCC | 4169 |
| 3294 | AAUAAAAU G CUAAACAA | 1366 | TTGTTTAG GGCTAGCTACAACGA ATTTTATT | 4170 |
| 27 | AAAUGGAU G UGGAAUAU | 1367 | ATATTCCA GGCTAGCTACAACGA ATCCATTT | 4171 |
| 52 | AUUUUCUU G UUUAAGGG | 1368 | CCCTTAAA GGCTAGCTACAACGA AAGAAAAT | 4172 |
| 75 | GAAGAGGU G UUGAGGUU | 1369 | AACCTCAA GGCTAGCTACAACGA ACCTCTTC | 4173 |
| 86 | GAGGUUAU G UCAAGCAU | 1370 | ATGCTTGA GGCTAGCTACAACGA ATAACCTC | 4174 |
| 155 | AAGAUAUU G UUAUCAUU | 1371 | AATGATAA GGCTAGCTACAACGA AATATCTT | 4175 |
| 221 | AAAGACCU G UGAUAAAC | 1372 | GTTTATCA GGCTAGCTACAACGA AGGTCTTT | 4176 |
| 253 | GGAAACGU G UGUCUAUA | 1373 | TATAGACA GGCTAGCTACAACGA ACGTTTCC | 4177 |
| 255 | AAACGUGU G UCUAUAUU | 1374 | AATATAGA GGCTAGCTACAACGA ACACGTTT | 4178 |
| 273 | UCAUAUCU G UAUAUAUA | 1375 | TATATATA GGCTAGCTACAACGA AGATATGA | 4179 |
| 344 | AGGGAGAU G UACAGCAA | 1376 | TTGCTGTA GGCTAGCTACAACGA ATCTCCCT | 4180 |
| 373 | AGAGUUCU G UGUUCAUC | 1377 | GATGAACA GGCTAGCTACAACGA AGAACTCT | 4181 |
| 375 | AGUUCUGU G UUCAUCUU | 1378 | AAGATGAA GGCTAGCTACAACGA ACAGAACT | 4182 |
| 457 | AAGGCAUU G UCGUUGCA | 1379 | TGCAACGA GGCTAGCTACAACGA AATGCCTT | 4183 |
| 478 | ACCCCAAU G UGCCAGAA | 1380 | TTCTGGCA GGCTAGCTACAACGA ATTGGGGT | 4184 |
| 537 | GCAUCUCU G UAUCUGUU | 1381 | AACAGATA GGCTAGCTACAACGA AGAGATGC | 4185 |
| 543 | CUGUAUCU G UUUGAAGC | 1382 | GCTTCAAA GGCTAGCTACAACGA AGATACAG | 4186 |
| 580 | UCAAAAAU G UUGCCAUU | 1383 | AATGGCAA GGCTAGCTACAACGA ATTTTTGA | 4187 |
| 625 | CUGACUAU G UGAGACCA | 1384 | TGGTCTCA GGCTAGCTACAACGA ATAGTCAG | 4188 |
| 661 | AUGCUGAU G UUCUGGUU | 1385 | AACCAGAA GGCTAGCTACAACGA ATCAGCAT | 4189 |
| 725 | GGGCAACU G UGGAGAGA | 1386 | TCTCTCCA GGCTAGCTACAACGA AGTTGCCC | 4190 |
| 814 | AGGCAUUU G UCCAUGAG | 1387 | CTCATGGA GGCTAGCTACAACGA AAATGCCT | 4191 |
| 911 | AGUAAGAU G UUCACCAC | 1388 | CTGCTGAA GGCTAGCTACAACGA ATCTTACT | 4192 |
| 937 | GUACAAAU G UAGUAAAG | 1389 | CTTTACTA GGCTAGCTACAACGA ATTTGTAC | 4193 |
| 950 | AAAGAAGU G UCAGGGAG | 1390 | CTCCCTGA GGCTAGCTACAACGA ACTTCTTT | 4194 |
| 965 | AGGCAGCU G UUACACCA | 1391 | TGGTGTAA GGCTAGCTACAACGA AGCTGCCT | 4195 |
| 1019 | AAAAGGAU G UGAGUUUG | 1392 | CAAACTCA GGCTAGCTACAACGA ATCCTTTT | 4196 |
| 1027 | GUGAGUUU G UUCUCCAA | 1393 | TTGGAGAA GGCTAGCTACAACGA AAACTCAC | 4197 |
| 1065 | UCUAUAAU G UUUGCACA | 1394 | TGTGCAAA GGCTAGCTACAACGA ATTATAGA | 4198 |
| 1078 | CACAACAU G UUGAUUCU | 1395 | AGAATCAA GGCTAGCTACAACGA ATGTTGTG | 4199 |
| 1100 | UGAAUUCU G UACAGAAC | 1396 | GTTCTGTA GGCTAGCTACAACGA AGAATTCA | 4200 |
| 1270 | AAAGAAUU G UGUGUUUA | 1397 | TAAACACA GGCTAGCTACAACGA AATTCTTT | 4201 |
| 1272 | AGAAUUGU G UGUUUAGU | 1398 | ACTAAACA GGCTAGCTACAACGA ACAATTCT | 4202 |
| 1274 | AAUUGUGU G UUUAGUCC | 1399 | GGACTAAA GGCTAGCTACAACGA ACACAATT | 4203 |
| 1414 | CUGCCCAU G UACAAAGU | 1400 | ACTTTGTA GGCTAGCTACAACGA ATGGGCAC | 4204 |
| 1534 | CAUUUACU G UGAUUAGG | 1401 | CCTAATCA GGCTAGCTACAACGA AGTAAATG | 4205 |
| 1573 | CUCAAAUU G UGCUGCUG | 1402 | CAGCAGCA GGCTAGCTACAACGA AATTTCAG | 4206 |
| 1695 | CAGGAGCU G UCCAAAAU | 1403 | ATTTTGGA GGCTAGCTACAACGA AGCTCCTC | 4207 |
| 1795 | AUGGAGCU G UCUCUCAG | 1404 | CTGAGAGA GGCTAGCTACAACGA AGCTCCAT | 4208 |
| 1902 | GACACUUU G UUUCUUAU | 1405 | ATAAGAAA GGCTAGCTACAACGA AAAGTCTC | 4209 |
| 1978 | GUGGCUUU G UAGUGGAC | 1406 | GTCCACTA GGCTAGCTACAACGA AAAGCCAC | 4210 |
| 2086 | CCCUGACU G UCACGUCC | 1407 | GGACGTGA GGCTAGCTACAACGA AGTCAGGG | 4211 |
| 2227 | GGGCCAGU G UCACAGCC | 1408 | GGCTGTGA GGCTAGCTACAACGA ACTGGCCC | 4212 |
| 2320 | AUGACGGU G UCUACUCA | 1409 | TGAGTACA GGCTAGCTACAACGA ACCGTCAT | 4213 |
| 2368 | GAUACAGU G UAAAAGUG | 1410 | CACTTTTA GGCTAGCTACAACGA ACTCTATC | 4214 |
| 2439 | GGAGCACU G UACAUACC | 1411 | GGTATGTA GGCTAGCTACAACGA AGTGCTCC | 4215 |
| 2512 | AGGAUGAU G UUCAACAC | 1412 | GTGTTGAA GGCTAGCTACAACGA ATCATCCT | 4216 |
| 2529 | AAGCAAGU G UGUUUCAG | 1413 | CTGAAACA GGCTAGCTACAACGA ACTTGCTT | 4217 |
| 2531 | GCAAGUCU G UUUCAGCA | 1414 | TGCTGAAA GGCTAGCTACAACGA ACACTTGC | 4218 |
| 2563 | GCUCAUUU G UGGCUUCU | 1415 | AGAAGCCA GGCTAGCTACAACGA AAATGAGC | 4219 |
| 2575 | CUUCUGAU G UCCCAAAU | 1416 | ATTTGGGA GGCTAGCTACAACGA ATCAGAAG | 4220 |
| 2829 | GUCUUUUU G UUUAAACC | 1417 | GGTTTAAA GGCTAGCTACAACGA AAAAAGAC | 4221 |
| 2890 | UUCAGGCU G UUGAUAAG | 1418 | CTTATCAA GGCTAGCTACAACGA AGCCTGAA | 4222 |
| 2943 | GUAUCUUU G UUUAUUCC | 1419 | GGAATAAA GGCTAGCTACAACGA AAAGATAC | 4223 |
| 3002 | UGCUCCUU G UCCUAAUA | 1420 | TATTAGGA GGCTAGCTACAACGA AAGGAGCA | 4224 |
| 3057 | AAAAUUAU G UGGAAGUG | 1421 | CACTTCCA GGCTAGCTACAACGA ATAATTTT | 4225 |
| 3084 | CUGCACCU G UCAAUAGC | 1422 | GCTATTGA GGCTAGCTACAACGA AGCTGCAG | 4226 |
| 3109 | GAAUUUUU G UCAGAUAA | 1423 | TTATCTGA GGCTAGCTACAACGA AAAAATTC | 4227 |
| 3166 | UCUAAAAU G UAUUUUAG | 1424 | CTAAAATA GGCTAGCTACAACGA ATTTTAGA | 4228 |
| 3182 | GACUUCCU G UAGGGGGC | 1425 | GCCCCCTA GGCTAGCTACAACGA AGGAAGTC | 4229 |
| 3272 | GACUUCCU G UAGGGGGC | 1425 | GCCCCCTA GGCTAGCTACAACGA AGGAAGTC | 4229 |
| 3203 | UACUAAAU G UAUAUACU | 1426 | ACTATATA GGCTAGCTACAACGA ATTTAGTA | 4230 |
| 3227 | UACUAAAU G UAUUCCUG | 1427 | CAGGAATA GGCTAGCTACAACGA ATTTAGTA | 4231 |
| 3235 | GUAUUCCU G UAGGGGGC | 1428 | GCCCCCTA GGCTAGCTACAACGA AGGAATAC | 4232 |
| 3256 | UACUAAAU G UAUUUUAG | 1429 | CTAAAATA GGCTAGCTACAACGA ATTTAGGTA | 4233 |
| 15 | UGCUUUUG G UACAAAUG | 1430 | CATTTGTA GGCTAGCTACAACGA CAAAAGCA | 4234 |
| 63 | UAAGGGGA G CAUGAAGA | 1431 | TCTTCATG GGCTAGCTACAACGA TCCCCTTA | 4235 |
| 73 | AUGAAGAG G UCUUGAGG | 1432 | CCTCAACA GGCTAGCTACAACGA CTCTTCAT | 4236 |
| 81 | GUGUUGAG G UUAUGUCA | 1433 | TGACATAA GGCTAGCTACAACGA CTCAACAC | 4237 |
| 91 | UAUGUCAA G CAUCUGGC | 1434 | GCCAGATG GGCTAGCTACAACGA TTGACATA | 4238 |
| 98 | AGCAUCUG G CACAGCUG | 1435 | CAGCTGTG GGCTAGCTACAACGA CAGATGCT | 4239 |
| 103 | CUGGCACA G CUGAAGGC | 1436 | GCCTTCAG GGCTAGCTACAACGA TGTGCCAG | 4240 |
| 110 | AGCUGAAG G CAGAUGGA | 1437 | TCCATCTG GGCTAGCTACAACGA CTTCAGCT | 4241 |
| 130 | AUUUACAA G UACGCAAU | 1438 | ATTGCGTA GGCTAGCTACAACGA TTGTAAAT | 4242 |
| 182 | AGACAAGA G CAAUAGUA | 1439 | TACTATTG GGCTAGCTACAACGA TCTTGTCT | 4243 |
| 188 | GACCAAUA G UAAAACAC | 1440 | GTGTTTTA GGCTAGCTACAACGA TATTGCTC | 4244 |
| 202 | CACAUCAG G UCAGGGGG | 1441 | CCCCCTGA GGCTAGCTACAACGA CTGATCTC | 4245 |
| 210 | GUCAGGGG G UUAAAGAC | 1442 | GTCTTTAA GGCTAGCTACAACGA CCCCTGAC | 4246 |
| 242 | UCCGAUAA G UUGGAAAC | 1443 | GTTTCCAA GGCTAGCTACAACGA TTATCGGA | 4247 |
| 251 | UUGGAAAC G UGUGUCUA | 1444 | TAGACACA GGCTAGCTACAACGA GTTTCCAA | 4248 |
| 287 | AUAUAAUG G UAAAGAAA | 1445 | TTTCTTTA GGCTAGCTACAACGA CATTATAT | 4249 |
| 305 | ACACCUUC G UAACCCGC | 1446 | GCGGGTTA GGCTAGCTACAACGA GAAGGTGT | 4250 |
| 349 | GAUGUACA G CAAUGGGG | 1447 | CCCCATTG GGCTAGCTACAACGA TGTACATC | 4251 |
| 357 | GCAAUGGG G CCAUUUAA | 1448 | TTAAATGG GGCTAGCTACAACGA CCCATTGC | 4252 |
| 368 | AUUUAAGA G UUCUGUGU | 1449 | ACACAGAA GGCTAGCTACAACGA TCTTAAAT | 4253 |
| 406 | UAGAAGGG G CCCUGAGU | 1450 | ACTCAGGG GGCTAGCTACAACGA CCCTTCTA | 4254 |
| 413 | GGCCCUGA G UAAUUCAC | 1451 | GTGAATTA GGCTAGCTACAACGA TCAGGGCC | 4255 |
| 429 | CUCAUUCA G CUGAACAA | 1452 | TTGTTCAG GGCTAGCTACAACGA TGAATGAG | 4256 |
| 443 | CAACAAUG G CUAUGAAG | 1453 | CTTCATAG GGCTAGCTACAACGA CATTGTTG | 4257 |
| 452 | CUAUGAAG G CAUUGUCG | 1454 | CGACAATG GGCTAGCTACAACGA CTTCATAG | 4258 |
| 460 | GCAUUGUC G UUGCAAUC | 1455 | GATTGCAA GGCTAGCTACAACGA GACAATGC | 4259 |
| 520 | AGGACAUG G UGACCCAG | 1456 | CTGGGTCA GGCTAGCTACAACGA CATGTCCT | 4260 |
| 529 | UGACCCAG G CAUCUCUG | 1457 | CAGAGATG GGCTAGCTACAACGA CTGGGTCA | 4261 |
| 550 | UGUUUGAA G CUACAGGA | 1458 | TCCTGTAG GGCTAGCTACAACGA TTCAAACA | 4262 |
| 561 | ACAGGAAA G CGAUUUUA | 1459 | TAAAATCG GGCTAGCTACAACGA TTTCCTGT | 4263 |
| 616 | AGACAAAG G CUGACUAU | 1460 | ATAGTCAG GGCTAGCTACAACGA CTTTGTCT | 4264 |
| 667 | AUGUUCUG G UUGCUGAG | 1461 | CTCAGCAA GGCTAGCTACAACGA CAGAACAT | 4265 |
| 675 | GUUGCUGA G UCUACUCC | 1462 | GGAGTAGA GGCTAGCTACAACGA TCAGCAAC | 4266 |
| 689 | UCCUCCAG G UAAUGAUG | 1463 | CATCATTA GGCTAGCTACAACGA CTGGAGGA | 4267 |
| 711 | UACACUGA G CAGAUGGG | 1464 | CCCATCTG GGCTAGCTACAACGA TCAGTGTA | 4268 |
| 719 | GCAGAUGG G CAACUGUG | 1465 | CACAGTTG GGCTAGCTACAACGA CCATCTGC | 4269 |
| 737 | AGAGAAGG G UGAAAGGA | 1466 | TCCTTTCA GGCTACCTACAACGA CCTTCTCT | 4270 |
| 780 | GGAAAAAA G UUAGCUGA | 1467 | TCAGCTAA GGCTAGCTACAACGA TTTTTTCC | 4271 |
| 784 | AAAAGUUA G CUGAAUAU | 1468 | ATATTCAG GGCTAGCTACAACGA TAACTTTT | 4272 |
| 803 | ACCACAAG G UAAGGCAU | 1469 | ATGCCTTA GGCTAGCTACAACGA CTTGTGGT | 4273 |
| 808 | AAGGUAAG G CAUUUGUC | 1470 | GACAAATG GGCTAGCTACAACGA CTTACCTT | 4274 |
| 822 | GUCCAUGA G UGGGCUCA | 1471 | TGAGCCCA GGCTAGCTACAACGA TCATGGAC | 4275 |
| 826 | AUGAGUGG G CUCAUCUA | 1472 | TAGATGAG GGCTAGCTACAACGA CCACTCAT | 4276 |
| 844 | GAUGGGGA G UAUUUGAC | 1473 | GTCAAATA GGCTAGCTACAACGA TCCCCATC | 4277 |
| 855 | UUUGACGA G UACAAUAA | 1474 | TTATTGTA GGCTAGCTACAACGA TCGTCAAA | 4278 |
| 901 | GAAUACAA G CAGUAAGA | 1475 | TCTTACTG GGCTAGCTACAACGA TTGTATTC | 4279 |
| 904 | UACAAGCA G UAAGAUGU | 1476 | ACATCTTA GGCTAGCTACAACGA TGCTTGTA | 4280 |
| 916 | GAUGUUCA G CAGGUAUU | 1477 | AATACCTG GGCTAGCTACAACGA TGAACATC | 4281 |
| 920 | UUCAGCAG G UAUUACUG | 1478 | CAGTAATA GGCTAGCTACAACGA CTGCTGAA | 4282 |
| 929 | UAUUACUG G UACAAAUG | 1479 | CATTTGTA GGCTAGCTACAACGA CAGTAATA | 4283 |
| 940 | CAAAUGUA G UAAAGAAG | 1480 | CTTCTTTA GGCTAGCTACAACGA TACATTTG | 4284 |
| 948 | GUAAAGAA G UGUCAGGG | 1481 | CCCTGACA GGCTAGCTACAACGA TTCTTTAC | 4285 |
| 959 | UCAGGGAG G CAGCUGUU | 1482 | AACAGCTG GGCTAGCTACAACGA CTCCCTGA | 4286 |
| 962 | GGGAGGCA G CUGUUACA | 1483 | TCTAACAG GGCTAGCTACAACGA TGCCTCCC | 4287 |
| 994 | UCAAUAAA G UUACAGGA | 1484 | TCCTGTAA GGCTAGCTACAACGA TTTATTGA | 4288 |
| 1023 | GGAUGUGA G UUUGUUCU | 1485 | AGAACAAA GGCTAGCTACAACGA TCACATCC | 4289 |
| 1054 | CGGAGAAG G CUUCUAUA | 1486 | TATAGAAG GGCTAGCTACAACGA CTTCTCCG | 4290 |
| 1090 | AUUCUAUA G UUGAAUUC | 1487 | GAATTCAA GGCTAGCTACAACGA TATAGAAT | 4291 |
| 1126 | ACAAAGAA G CUCCAAAC | 1488 | CTTTCCAG GGCTAGCTACAACGA TTCTTTGT | 4292 |
| 1137 | CCAAACAA G CAAAAUCA | 1489 | TCATTTTC GGCTAGCTACAACGA TTGTTTCC | 4293 |
| 1163 | UCUCCCAA G CACAUGGG | 1490 | CCCATGTG GGCTAGCTACAACGA TTCGGAGA | 4294 |
| 1174 | CAUGGGAA G UGAUCCGU | 1491 | ACGGATCA GGCTAGCTACAACGA TTCCCATC | 4295 |
| 1181 | AGUGAUCC G UGAUUCUG | 1492 | CAGAATCA GGCTAGCTACAACGA GGATCACT | 4296 |
| 1224 | ACAACACA G CCACCAAA | 1493 | TTTGCTGG GGCTAGCTACAACGA TGTGTTGT | 4297 |
| 1279 | UGUGUUUA G UCCUUGAC | 1494 | GTCAAGGA GGCTAGCTACAACGA TAAACACA | 4298 |
| 1298 | AUCUCCAA G CAUGGCGA | 1495 | TCGCCATG GGCTAGCTACAACGA TTCCAGAT | 4299 |
| 1303 | GAAGCAUG G CGACUGGU | 1496 | ACCAGTCC GGCTAGCTACAACGA CATGCTTC | 4300 |
| 1310 | GGCGACUG G UAACCGCC | 1497 | GGCGGTTA GGCTAGCTACAACGA CAGTCGCC | 4301 |
| 1336 | UGAAUCAA G CAGGCCAG | 1498 | CTGGCCTC GGCTAGCTACAACGA TTGATTCA | 4302 |
| 1340 | UCAAGCAG G CCAGCUUU | 1499 | AAAGCTGG GGCTAGCTACAACGA CTGCTTGA | 4303 |
| 1344 | GCAGGCCA G CUUUUCCU | 1500 | AGGAAAAG GGCTAGCTACAACGA TGGCCTGC | 4304 |
| 1363 | UGCAGACA G UUGAGCUG | 1501 | CAGCTCAA GGCTAGCTACAACGA TGTCTGCA | 4305 |
| 1368 | ACAGUUGA G CUGGGGUC | 1502 | GACCCCAG GGCTAGCTACAACGA TCAACTGT | 4306 |
| 1374 | GAGCUGGG G UCCUGGGU | 1503 | ACCCAGGA GGCTAGCTACAACGA CCCAGCTC | 4307 |
| 1381 | GGUCCUGG G UUGGGAUG | 1504 | CATCCCAA GGCTAGCTACAACGA CCAGGACC | 4308 |
| 1390 | UUGGGAUG G UGACAUUU | 1505 | AAATGTCA GGCTAGCTACAACGA CATCCCAA | 4309 |
| 1403 | AUUUGACA G UGCUGCCC | 1506 | GGGCAGCA GGCTAGCTACAACGA TGTCAAAT | 4310 |
| 1421 | UGUACAAA G UGAACUCA | 1507 | TGAGTTCA GGCTAGCTACAACGA TTTGTACA | 4311 |
| 1442 | GAUAGACA G UGGCAGUG | 1508 | CACTGCCA GGCTAGCTACAACGA TGTTTATC | 4312 |
| 1445 | AAACAGUG G CAGUGACA | 1509 | TGTCACTG GGCTAGCTACAACGA CACTGTTT | 4313 |
| 1448 | CAGUGGCA G UGACAGGG | 1510 | CCCTGTCA GGCTAGCTACAACGA TGCCACTG | 4314 |
| 1483 | UACCUGCA G CAGCUUCA | 1511 | TGAAGCTG GGCTAGCTACAACGA TGCAGGTA | 4315 |
| 1486 | CUGCAGCA G CUUCAGGA | 1512 | TCCTGAAG GGCTAGCTACAACGA TGCTGCAG | 4316 |
| 1500 | GGAGGGAC G UCCAUCUG | 1513 | CAGATGGA GGCTAGCTACAACGA GTCCCTCC | 4317 |
| 1511 | CAUCUGCA G CGGGCUUC | 1514 | GAAGCCCG GGCTAGCTACAACGA TGCAGATG | 4318 |
| 1515 | UGCAGCGG G CUUCGAUC | 1515 | GATCGAAG GGCTAGCTACAACGA CCGCTGCA | 4319 |
| 1525 | UUCGAUCG G CAUUUACU | 1516 | AGTAAATG GGCTAGCTACAACGA CGATCGAA | 4320 |
| 1607 | CACUAUAA G UGGGUGCU | 1517 | AGCACCCA GGCTAGCTACAACGA TTATAGTG | 4321 |
| 1611 | AUAAGUGG G UGCUUUAA | 1518 | TTAAAGCA GGCTAGCTACAACGA CCACTTAT | 4322 |
| 1624 | UUAACGAG G UCAAACAA | 1519 | TTGTTTGA GGCTAGCTACAACGA CTCGTTAA | 4323 |
| 1634 | CAAACAAA G UGGUGCCA | 1520 | TGGCACCA GGCTAGCTACAACGA TTTGTTTG | 4324 |
| 1637 | ACAAAGUG G UGCCAUCA | 1521 | TGATGGCA GGCTAGCTACAACGA CACTTTGT | 4325 |
| 1654 | UCCACACA G UCGCUUUG | 1522 | CAAAGCGA GGCTAGCTACAACGA TGTGTGGA | 4326 |
| 1665 | GCUUUGGG G CCCUCUGC | 1523 | GCAGAGGG GGCTAGCTACAACGA CCCAAAGC | 4327 |
| 1675 | CCUCUGCA G CUCAAGAA | 1524 | TTCTTGAG GGCTAGCTACAACGA TGCAGAGG | 4328 |
| 1692 | CUAGAGGA G CUGUCCAA | 1525 | TTGGACAG GGCTAGCTACAACGA TCCTCTAG | 4329 |
| 1712 | GACAGGAG G UUUACAGA | 1526 | TCTGTAAA GGCTAGCTACAACGA CTCCTGTC | 4330 |
| 1738 | CAGAUCAA G UUCAGAAC | 1527 | GTTCTGAA GGCTAGCTACAACGA TTGATCTG | 4331 |
| 1751 | GAACAAUG G CCUCAUUG | 1528 | CAATGAGG GGCTAGCTACAACGA CATTGTTC | 4332 |
| 1771 | CUUUUGGG G CCCUUUCA | 1529 | TGAAAGGG GGCTAGCTACAACGA CCCAAAAG | 4333 |
| 1792 | GAAAUGGA G CUGUCUCU | 1530 | AGAGACAG GGCTAGCTACAACGA TCCATTTC | 4334 |
| 1803 | GUCUCUCA G CGCUCCAU | 1531 | ATGGAGCG GGCTAGCTACAACGA TGAGAGAC | 4335 |
| 1815 | UCCAUCCA G CUUGAGAG | 1532 | CTCTCAAG GGCTAGCTACAACGA TGGATGGA | 4336 |
| 1823 | GCUUGAGA G UAAGGGAU | 1533 | ATCCCTTA GGCTAGCTACAACGA TCTCAAGC | 4337 |
| 1847 | CCAGAACA G CCAGUGGA | 1534 | TCCACTGG GGCTAGCTACAACGA TGTTCTGG | 4338 |
| 1851 | AACAGCCA G UGGAUGAA | 1535 | TTCATCCA GGCTAGCTACAACGA TGGCTGTT | 4339 |
| 1862 | GAUGAAUG G CACAGUGA | 1536 | TCACTGTG GGCTAGCTACAACGA CATTCATC | 4340 |
| 1867 | AUGGCACA G UGAUCGUG | 1537 | CACGATCA GGCTAGCTACAACGA TGTGCCAT | 4341 |
| 1873 | CAGUGAUC G UGGACAGC | 1538 | GCTGTCCA GGCTAGCTACAACGA GATCACTG | 4342 |
| 1880 | CGUGGACA G CACCGUGG | 1539 | CCACGGTG GGCTAGCTACAACGA TGTCCACG | 4343 |
| 1885 | ACAGCACC G UGGGAAAG | 1540 | CTTTCCCA GGCTAGCTACAACGA GGTGCTGT | 4344 |
| 1926 | ACAACGCA G CCUCCCCA | 1541 | TGGGGAGG GGCTAGCTACAACGA TGCGTTGT | 4345 |
| 1955 | GGAUCCCA G UGGACAGA | 1542 | TCTGTCCA GGCTAGCTACAACGA TGGGATCC | 4346 |
| 1965 | GGACAGAA G CAAGGUGG | 1543 | CCACCTTG GGCTAGCTACAACGA TTCTGTCC | 4347 |
| 1970 | GAAGCAAG G UGGCUUUG | 1544 | CAAAGCCA GGCTAGCTACAACGA CTTGCTTC | 4348 |
| 1973 | GCAAGGUG G CUUUGUAG | 1545 | CTACAAAG GGCTAGCTACAACGA CACCTTGC | 4349 |
| 1981 | GCUUUGUA G UGGACAAA | 1546 | TTTGTCCA GGCTAGCTACAACGA TACAAAGC | 4350 |
| 2002 | CCAAAAUG G CCUACCUC | 1547 | GAGGTAGG GGCTAGCTACAACGA CATTTTGG | 4351 |
| 2021 | AAUCCCAG G CAUUGCUA | 1548 | TAGCAATG GGCTAGCTACAACGA CTGGGATT | 4352 |
| 2032 | UUGCUAAG G UUGGCACU | 1549 | AGTGCCAA GGCTAGCTACAACGA CTTAGCAA | 4353 |
| 2036 | UAAGGUUG G CACUUGGA | 1550 | TCCAAGTG GGCTAGCTACAACGA CAACCTTA | 4354 |
| 2051 | GAAAUACA G UCUGCAAG | 1551 | CTTGCAGA GGCTAGCTACAACGA TGTATTTC | 4355 |
| 2059 | GUCUGCAA G CAAGCUCA | 1552 | TGAGCTTG GGCTAGCTACAACGA TTGCAGAC | 4356 |
| 2063 | GCAAGCAA G CUCACAAA | 1553 | TTTGTGAG GGCTAGCTACAACGA TTGCTTGC | 4357 |
| 2091 | ACUGUCAC G UCCCGUGC | 1554 | GCACGGGA GGCTAGCTACAACGA GTGACAGT | 4358 |
| 2096 | CACGUCCC G UGCGUCCA | 1555 | TGGACGCA GGCTAGCTACAACGA GGGACGTG | 4359 |
| 2100 | UCCCGUGC G UCCAAUGC | 1556 | GCATTGGA GGCTAGCTACAACGA GCACGGGA | 4360 |
| 2128 | CAAUUACA G UGACUUCC | 1557 | GGAAGTCA GGCTAGCTACAACGA TGTAATTG | 4361 |
| 2156 | GGACACCA G CAAUUCC | 1558 | GGAATTTG GGCTAGCTACAACGA TGGTGTCC | 4362 |
| 2168 | AUUCCCCA G CCCUCUGG | 1559 | CCAGAGGG GGCTAGCTACAACGA TGGGGAAT | 4363 |
| 2176 | GCCCUCUG G UAGUUUAU | 1560 | ATAAACTA GGCTAGCTACAACGA CAGAGGGC | 4364 |
| 2179 | CUCUGGUA G UUUAUGCA | 1561 | TGCATAAA GGCTAGCTACAACGA TACCAGAG | 4365 |
| 2203 | GCCAAGGA G CCUCCCCA | 1562 | TGGGGAGG GGCTAGCTACAACGA TCCTTGGC | 4366 |
| 2221 | UUCUCAGG G CCAGUGUC | 1563 | GACACTGG GGCTAGCTACAACGA CCTGAGAA | 4367 |
| 2225 | CAGGGCCA G UGUCACAC | 1564 | CTGTGACA GGCTAGCTACAACGA TGGCCCTG | 4368 |
| 2233 | GUGUCACA G CCCUCAUU | 1565 | AATCAGGG GGCTAGCTACAACGA TGTGACAC | 4369 |
| 2248 | UUGAAUCA G UGAAUGGA | 1566 | TCCATTCA GGCTAGCTACAACGA TGATTCAA | 4370 |
| 2263 | GAAAAACA G UUACCUUG | 1567 | CAAGGTAA GGCTAGCTACAACGA TGTTTTTC | 4371 |
| 2290 | AUAAUGGA G CAGGUGCU | 1568 | AGCACCTG GGCTAGCTACAACGA TCCATTAT | 4372 |
| 2294 | UCGAGCAG G UCCUGAUG | 1569 | CATCAGCA GGCTAGCTACAACGA CTGCTCCA | 4373 |
| 2318 | GGAUGACG G UGUCUACU | 1570 | ACTAGACA CGCTAGCTACAACGA CGTCATCC | 4374 |
| 2331 | UACUCAAG G UAUUUCAC | 1571 | GTCAAATA GGCTAGCTACAACCA CTTCACTA | 4375 |
| 2357 | CACGAAUG G UAGAUACA | 1572 | TGTATCTA GGCTAGCTACAACGA CATTCGTG | 4376 |
| 2366 | UAGAUACA G UGUAAAAG | 1573 | CTTTTACA GGCTAGCTACAACGA TGTATCTA | 4377 |
| 2374 | GUGUAAAA G UGCGGGCU | 1574 | AGCCCGCA GGCTAGCTACAACGA TTTTACAC | 4378 |
| 2380 | AAGUGCGG G CUCUGGGA | 1575 | TCCCAGAG GGCTAGCTACAACGA CCGCACTT | 4379 |
| 2392 | UGGGAGGA G UUAACGCA | 1576 | TGCGTTAA GGCTAGCTACAACGA TCCTCCCA | 4380 |
| 2401 | UUAACGCA G CCAGACGG | 1577 | CCGTCTGG GGCTAGCTACAACGA TGCGTTAA | 4381 |
| 2413 | GACGGAGA G UGAUACCC | 1578 | GGGTATCA GGCTAGCTACAACGA TCTCCGTC | 4382 |
| 2424 | AUACCCCA G CAGAGUGG | 1579 | CCACTCTG GGCTAGCTACAACGA TGGGGTAT | 4383 |
| 2429 | CCAGCAGA G UGGAGCAC | 1580 | GTGCTCCA GGCTAGCTACAACGA TCTGCTGG | 4384 |
| 2434 | AGAGUGGA G CACUGUAC | 1581 | GTACAGTG GGCTAGCTACAACGA TCCACTCT | 4385 |
| 2450 | CAUACCUG G CUGGAUUG | 1582 | CAATCCAG GGCTAGCTACAACGA CAGGTATG | 4386 |
| 2523 | CAACACAA G CAAGUGUG | 1583 | CACACTTG CGCTAGCTACAACGA TTGTCTTG | 4387 |
| 2527 | ACAAGCAA G UGUGUUUC | 1584 | GAAACACA GGCTAGCTACAACGA TTGCTTCT | 4388 |
| 2537 | GUCUUUCA G CAGAACAU | 1585 | ATGTTCTG GCCTAGCTACAACGA TGAAACAC | 4389 |
| 2555 | CUCGGGAG G CUCAUUUG | 1586 | CAAATGAG GGCTAGCTACAACGA CTCCCGAG | 4390 |
| 2566 | CAUUUGUG G CUUCUGAU | 1587 | ATCAGAAG GGCTAGCTACAACGA CACAAATG | 4391 |
| 2612 | CCCACCUG G CCAAAUCA | 1588 | TGATTTGG GGCTAGCTACAACGA CAGGTCCC | 4392 |
| 2632 | ACCUGAAG G CGGAAAUU | 1589 | AATTTCCG GGCTAGCTACAACGA CTTCAGGT | 4393 |
| 2648 | UCACGGGG G CAGUCUCA | 1590 | TGACACTG GGCTAGCTACAACGA CCCCGTGA | 4394 |
| 2651 | CGGGGGCA G UCUCAUUA | 1591 | TAATGAGA GGCTAGCTACAACGA TGCCCCCG | 4395 |
| 2674 | CUUGGACA G CUCCUGGG | 1592 | CCCAGGAG GGCTAGCTACAACGA TGTCCAAG | 4396 |
| 2704 | AUGGAACA G CUCACAAG | 1593 | CTTGTGAG GGCTAGCTACAACGA TGTTCCAT | 4397 |
| 2712 | GCUCACAA G UAUAUCAU | 1594 | ATGATATA GCCTAGCTACAACGA TTGTCAGC | 4398 |
| 2729 | UCGAAUAA G UACAAGUA | 1595 | TACTTGTA GGCTAGCTACAACGA TTATTCCA | 4399 |
| 2735 | AAGUACAA G UAUUCUUG | 1596 | CAAGAATA GGCTAGCTACAACGA TTGTACTT | 4400 |
| 2757 | AGAGACAA G UUCAAUGA | 1597 | TCATTGAA GGCTAGCTACAACGA TTGTCTCT | 4401 |
| 2776 | CUCUUCAA G UGAAUACU | 1598 | AGTATTCA GGCTAGCTACAACGA TTGAACAG | 4402 |
| 2806 | CAAAGGAA G CCAACUCU | 1599 | AGAGTTGG GGCTAGCTACAACGA TTCCTTTG | 4403 |
| 2821 | CUGAGGAA G UCUUUUUG | 1600 | CAAAAAGA GGCTAGCTACAACGA TTCCTCAG | 4404 |
| 2861 | UGAAAAUG G CACAGAUC | 1601 | GATCTGTG GGCTAGCTACAACGA CATTTTCA | 4405 |
| 2887 | CUAUUCAG G CUGUUGAU | 1602 | ATCAACAG GGCTAGCTACAACGA CTGAATAG | 4406 |
| 2899 | UUGAUAAC G UCGAUCUG | 1603 | CAGATCGA GGCTAGCTACAACGA CTTATCAA | 4407 |
| 2935 | UUGCACGA G UAUCUUUG | 1604 | CAAAGATA GGCTAGCTACAACGA TCGTGCAA | 4408 |
| 2978 | GACACCUA G UCCUGAUG | 1605 | CATCAGGA GGCTAGCTACAACGA TAGGTGTC | 4409 |
| 2991 | GAUGAAAC G UCUGCUCC | 1606 | GGAGCAGA GGCTAGCTACAACGA GTTTCATC | 4410 |
| 3023 | UAUCAACA G CACCAUUC | 1607 | GAATGGTG GGCTAGCTACAACGA TGTTGATA | 4411 |
| 3035 | CAUUCCUG G CAUUCACA | 1608 | TGTGAATG GGCTAGCTACAACGA CAGGAATG | 4412 |
| 3063 | AUGUGGAA G UGGAUAGG | 1609 | CCTATCCA GGCTAGCTACAACGA TTCCACAT | 4413 |
| 3081 | GAACUGCA G CUGUCAAU | 1610 | ATTGACAG GGCTAGCTACAACGA TGCAGTTC | 4414 |
| 3091 | UGUCAAUA G CCUAGGGC | 1611 | GCCCTAGG GGCTAGCTACAACGA TATTGACA | 4415 |
| 3098 | AGCCUAGG G CUGAAUUU | 1612 | AUATTCAG GGCTAGCTACAACGA CCTAGGCT | 4416 |
| 3189 | UGUAGGGG G CGAUAUAC | 1613 | GTATATCG GGCTAGCTACAACGA CCCCTACA | 4417 |
| 3242 | UGUAGGGG G CGAUAUAC | 1613 | GTATATCG GGCTAGCTACAACGA CCCCTACA | 4417 |
| 3210 | UGUAUAUA G UACAUUUA | 1614 | TAAATGTA GGCTAGCTACAACGA TATATACA | 4418 |
| 3279 | UGUAGGGG G CGAUAAAA | 1615 | TTTTATCG GGCTAGCTACAACGA CCCCTACA | 4419 |
| 21 | UGGUACAA A UGGAUGUG | 1616 | CACATCCA GGCTAGCTACAACGA TTGTACCA | 4420 |
| 25 | ACAAAUGG A UGUGGAAU | 1617 | ATTCCACA GGCTAGCTACAACGA CCATTTGT | 4421 |
| 32 | GAUGUGGA A UAUAAUUG | 1618 | CAATTATA GGCTAGCTACAACGA TCCACATC | 4422 |
| 37 | GGAAUAUA A UUGAAUAU | 1619 | ATATTCAA GGCTAGCTACAACGA TATATTCC | 4423 |
| 42 | AUAAUUGA A UAUUUUCU | 1620 | AGAAAATA GGCTAGCTACAACGA TCAATTAT | 4424 |
| 114 | GAAGGCAG A UGGAAAUA | 1621 | TATTTCCA GGCTAGCTACAACGA CTGCCTTC | 4425 |
| 120 | AGAUGGAA A UAUUUACA | 1622 | TGTAAATA GGCTAGCTACAACGA TTCCATCT | 4426 |
| 137 | AGUACGCA A UUUGAGAC | 1623 | GTCTCAAA GGCTAGCTACAACGA TGCGTACT | 4427 |
| 144 | AAUUUGAG A CUAAGAUA | 1624 | TATCTTAG GGCTAGCTACAACGA CTCAAATT | 4428 |
| 150 | AGACUAAG A UAUUGUUA | 1625 | TAACAATA GGCTAGCTACAACGA CTTAGTCT | 4429 |
| 176 | UAUUGAAG A CAAGAGCA | 1626 | TGCTCTTG GGCTAGCTACAACGA CTTCAATA | 4430 |
| 185 | CAAGAGCA A UAGUAAAA | 1627 | TTTTACTA GGCTAGCTACAACGA TGCTCTTG | 4431 |
| 193 | AUAGUAAA A CACAUCAG | 1628 | CTGATGTG GGCTAGCTACAACGA TTTACTAT | 4432 |
| 217 | GGUUAAAG A CCUGUGAU | 1629 | ATCACAGG GGCTAGCTACAACGA CTTTAACC | 4433 |
| 224 | GACCUGUG A UAAACCAC | 1630 | GTGGTTTA GGCTAGCTACAACGA CACAGGTC | 4434 |
| 228 | UGUGAUAA A CCACUUCC | 1631 | GGAAGTGG GGCTAGCTACAACGA TTATCACA | 4435 |
| 238 | CACUUCCG A UAAGUUGG | 1632 | CCAACTTA GGCTAGCTACAACGA CGGAAGTG | 4436 |
| 249 | AGUUGGAA A CGUGUGUC | 1633 | GACACACG GGCTAGCTACAACGA TTCCAACT | 4437 |
| 284 | UAUAUAUA A UGGUAAAG | 1634 | CTTTACCA GGCTAGCTACAACGA TATATATA | 4438 |
| 297 | AAAGAAAG A CACCUUCG | 1635 | CGAAGGTG GGCTAGCTACAACGA CTTTCTTT | 4439 |
| 308 | CCUUCGUA A CCCGCAUU | 1636 | AATGCGGG GGCTAGCTACAACGA TACGAAGG | 4440 |
| 331 | AGAGAGGA A UCACAGGG | 1637 | CCCTGTGA GGCTAGCTACAACGA TCCTCTCT | 4441 |
| 342 | ACAGGGAG A UGUACAGC | 1638 | GCTGTACA GGCTAGCTACAACGA CTCCCTGT | 4442 |
| 352 | GUACAGCA A UGGGGCCA | 1639 | TGGCCCCA GGCTAGCTACAACGA TGCTGTAC | 4443 |
| 385 | UCAUCUUG A UUCUUCAC | 1640 | GTGAAGAA GGCTAGCTACAACGA CAAGATGA | 4444 |
| 416 | CCUGAGUA A UUCACUCA | 1641 | TGAGTGAA GGCTAGCTACAACGA TACTCAGG | 4445 |
| 434 | UCAGCUGA A CAACAAUG | 1642 | CATTGTTG GGCTAGCTACAACGA TCAGCTGA | 4446 |
| 437 | GCUGAACA A CAAUGGCU | 1643 | AGCCATTG GGCTAGCTACAACGA TGTTCAGC | 4447 |
| 440 | GAACAACA A UGGCUAUG | 1644 | CATAGCCA GGCTAGCTACAACGA TGTTGTTC | 4448 |
| 466 | UCGUUGCA A UCGACCCC | 1645 | GGGGTCGA GGCTAGCTACAACGA TGCAACGA | 4449 |
| 470 | UGCAAUCG A CCCCAAUG | 1646 | CATTGGGG GGCTAGCTACAACGA CGATTGCA | 4450 |
| 476 | CGACCCCA A UGUGCCAG | 1647 | CTGGCACA GGCTAGCTACAACGA TGGGGTCG | 4451 |
| 488 | GCCAGAAG A UGAAACAC | 1648 | GTGTTTCA GGCTAGCTACAACGA CTTCTGGC | 4452 |
| 493 | AAGAUGAA A CACUCAUU | 1649 | AATGAGTG GGCTAGCTACAACGA TTCATCTT | 4453 |
| 504 | CUCAUUCA A CAAAUAAA | 1650 | TTTATTTG GGCTAGCTACAACGA TGAATGAG | 4454 |
| 508 | UUCAACAA A UAAAGGAC | 1651 | GTCCTTTA GGCTAGCTACAACGA TTGTTGAA | 4455 |
| 515 | AAUAAAGG A CAUGGUGA | 1652 | TCACCATG GGCTAGCTACAACGA CCTTTATT | 4456 |
| 523 | ACAUGGUG A CCCAGGCA | 1653 | TGCCTGGG GGCTAGCTACAACGA CACCATGT | 4457 |
| 564 | GGAAAGCG A UUUUAUUU | 1654 | AAATAAAA GGCTAGCTACAACGA CGCTTTCC | 4458 |
| 578 | UUUCAAAA A UGUUGCCA | 1655 | TGGCAACA GGCTAGCTACAACGA TTTTGAAA | 4459 |
| 592 | CCAUUUUG A UUCCUGAA | 1656 | TTCAGGAA GGCTAGCTACAACGA CAAAATGG | 4460 |
| 601 | UUCCUGAA A CAUGGAAG | 1657 | CTTCCATG GGCTAGCTACAACGA TTCAGGAA | 4461 |
| 610 | CAUGGAAG A CAAAGGCU | 1658 | AGCCTTTG GGCTAGCTACAACGA CTTCCATG | 4462 |
| 620 | AAAGGCUG A CUAUGUGA | 1659 | TCACATAG GGCTAGCTACAACGA CAGCCTTT | 4463 |
| 630 | UAUGUGAG A CCAAAACU | 1660 | AGTTTTGG GGCTAGCTACAACGA CTCACATA | 4464 |
| 636 | AGACCAAA A CUUGAGAC | 1661 | GTCTCAAG GGCTAGCTACAACGA TTTGGTCT | 4465 |
| 643 | AACUUGAG A CCUACAAA | 1662 | TTTGTAGG GGCTAGCTACAACGA CTCAAGTT | 4466 |
| 653 | CUACAAAA A UGCUGAUG | 1663 | CATCAGCA GGCTAGCTACAACGA TTTTGTAG | 4467 |
| 659 | AAAUGCUG A UGUUCUGG | 1664 | CCAGAACA GGCTAGCTACAACGA CAGCATTT | 4468 |
| 692 | UCCAGGUA A UGAUGAAC | 1665 | GTTCATCA GGCTAGCTACAACGA TACCTGGA | 4469 |
| 695 | AGGUAAUG A UGAACCCU | 1666 | AGGGTTCA GGCTAGCTACAACGA CATTACCT | 4470 |
| 699 | AAUGAUGA A CCCUACAC | 1667 | GTGTAGGG GGCTAGCTACAACGA TCATCATT | 4471 |
| 715 | CUGAGCAG A UGGGCAAC | 1668 | GTTGCCCA GGCTAGCTACAACGA CTGCTCAG | 4472 |
| 722 | GAUGGGCA A CUGUGGAG | 1669 | CTCCACAG GGCTAGCTACAACGA TGCCCATC | 4473 |
| 745 | GUGAAAGG A UCCACCUC | 1670 | GAGGTGGA GGCTAGCTACAACGA CCTTTCAC | 4474 |
| 761 | CACUCCUG A UUUCAUUG | 1671 | CAATGAAA GGCTAGCTACAACGA CAGGAGTG | 4475 |
| 789 | UUAGCUGA A UAUGGACC | 1672 | GGTCCATA GGCTAGCTACAACGA TCAGCTAA | 4476 |
| 795 | GAAUAUGG A CCACAAGG | 1673 | CCTTGTGG GGCTAGCTACAACGA CCATATTC | 4477 |
| 837 | CAUCUACG A UGGGGAGU | 1674 | ACTCCCCA GGCTAGCTACAACGA CGTAGATG | 4478 |
| 851 | AGUAUUUG A CGAGUACA | 1675 | TGTACTCG GGCTAGCTACAACGA CAAATACT | 4479 |
| 860 | CGAGUACA A UAAUGAUG | 1676 | CATCATTA GGCTAGCTACAACGA TGTACTCG | 4480 |
| 863 | GUACAAUA A UGAUGAGA | 1677 | TCTCATCA GGCTAGCTACAACGA TATTGTAC | 4481 |
| 866 | CAAUAAUG A UGAGAAAU | 1678 | ATTTCTCA GGCTAGCTACAACGA CATTATTG | 4482 |
| 873 | GAUGAGAA A UUCUACUU | 1679 | AAGTAGAA GGCTAGCTACAACGA TTCTCATC | 4483 |
| 887 | CUUAUCCA A UGGAAGAA | 1680 | TTCTTCCA GGCTAGCTACAACGA TGGATAAG | 4484 |
| 895 | AUGGAAGA A UACAAGCA | 1681 | TGCTTGTA GGCTAGCTACAACGA TCTTCCAT | 4485 |
| 909 | GCAGUAAG A UGUUCAGC | 1682 | GCTGAACA GGCTAGCTACAACGA CTTACTGC | 4486 |
| 935 | UCGUACAA A UGUAGUAA | 1683 | TTACTACA GGCTAGCTACAACGA TTGTACCA | 4487 |
| 978 | ACCAAAAG A UGCACAUU | 1684 | AATGTGCA GGCTAGCTACAACGA CTTTTGGT | 4488 |
| 989 | CACAUUCA A UAAAGUUA | 1685 | TAACTTTA GGCTAGCTACAACGA TGAATGTG | 4489 |
| 1002 | GUUACAGG A CUCUAUGA | 1686 | TCATAGAG GGCTAGCTACAACGA CCTGTAAC | 4490 |
| 1017 | GAAAAAGG A UGUGAGUU | 1687 | AACTCACA GGCTAGCTACAACGA CCTTTTTC | 4491 |
| 1035 | GUUCUCCA A UCCCGCCA | 1688 | TGGCGGGA GGCTAGCTACAACGA TGGAGAAC | 4492 |
| 1045 | CCCGCCAG A CGGAGAAG | 1689 | CTTCTCCG GGCTAGCTACAACGA CTGGCGGG | 4493 |
| 1063 | CUUCUAUA A UGUUUGCA | 1690 | TGCAAACA GGCTAGCTACAACGA TATAGAAG | 4494 |
| 1074 | UUUGCACA A CAUGUUGA | 1691 | TCAACATG GGCTAGCTACAACGA TGTGCAAA | 4495 |
| 1082 | ACAUGUUG A UUCUAUAG | 1692 | CTATAGAA GGCTAGCTACAACGA CAACATGT | 4496 |
| 1095 | AUAGUUGA A UUCUGUAC | 1693 | GTACAGAA GGCTAGCTACAACGA TCAACTAT | 4497 |
| 1107 | UGUACAGA A CAAAACCA | 1694 | TGGTTTTG GGCTAGCTACAACGA TCTGTACA | 4498 |
| 1112 | AGAACAAA A CCACAACA | 1695 | TCTTGTGG GGCTAGCTACAACGA TTTGTTCT | 4499 |
| 1118 | AAACCACA A CAAAGAAG | 1696 | CTTCTTTG GGCTAGCTACAACGA TGTGGTTT | 4500 |
| 1133 | AGCUCCAA A CAAGCAAA | 1697 | TTTGCTTG GGCTAGCTACAACGA TTGGAGCT | 4501 |
| 1142 | CAAGCAAA A UCAAAAAU | 1698 | ATTTTTGA GGCTAGCTACAACGA TTTGCTTG | 4502 |
| 1149 | AAUCAAAA A UGCAAUCU | 1699 | AGATTGCA GGCTAGCTACAACGA TTTTGATT | 4503 |
| 1154 | AAAAUGCA A UCUCCGAA | 1700 | TTCGGAGA GGCTAGCTACAACGA TGCATTTT | 4504 |
| 1177 | GGGAAGUG A UCCGUGAU | 1701 | ATCACGGA GGCTAGCTACAACGA CACTTCCC | 4505 |
| 1184 | GAUCCGUG A UUCUGAGG | 1702 | CCTCAGAA GGCTAGCTACAACGA CACGGATC | 4506 |
| 1193 | UUCUGAGG A CUUUAAGA | 1703 | TCTTAAAG GGCTAGCTACAACGA CCTCAGAA | 4507 |
| 1204 | UUAAGAAA A CCACUCCU | 1704 | AGGAGTGG GGCTAGCTACAACGA TTTCTTAA | 4508 |
| 1216 | CUCCUAUG A CAACACAG | 1705 | CTGTGTTG GGCTAGCTACAACGA CATAGGAG | 4509 |
| 1219 | CUAUGACA A CACAGCCA | 1706 | TGGCTGTG GGCTAGCTACAACGA TGTCATAG | 4510 |
| 1232 | GCCACCAA A UCCCACCU | 1707 | AGGTGGGA GGCTAGCTACAACGA TTGGTGGC | 4511 |
| 1255 | UGCUGCAG A UUGGACAA | 1708 | TTGTCCAA GGCTAGCTACAACGA CTGCAGCA | 4512 |
| 1260 | CAGAUUGG A CAAAGAAU | 1709 | ATTCTTTG GGCTAGCTACAACGA CCAATCTG | 4513 |
| 1267 | GACAAAGA A UUGUGUGU | 1710 | ACACACAA GGCTAGCTACAACGA TCTTTGTC | 4514 |
| 1286 | AGUCCUUG A CAAAUCUG | 1711 | CAGATTTG GGCTAGCTACAACGA CAAGGACT | 4515 |
| 1290 | CUUGACAA A UCUGGAAG | 1712 | CTTCCAGA GGCTAGCTACAACGA TTGTCAAG | 4516 |
| 1306 | GCAUGGCG A CUGGUAAC | 1713 | GTTACCAG GGCTAGCTACAACGA CGCCATGC | 4517 |
| 1313 | GACUGGUA A CCGCCUCA | 1714 | TGAGGCGG GGCTAGCTACAACGA TACCAGTC | 4518 |
| 1322 | CCGCCUCA A UCGACUGA | 1715 | TCAGTCGA GGCTAGCTACAACGA TGAGGCGG | 4519 |
| 1326 | CUCAAUCG A CUGAAUCA | 1716 | TGATTCAG GGCTAGCTACAACGA CGATTGAG | 4520 |
| 1331 | UCGACUGA A UCAAGCAG | 1717 | CTGCTTGA GGCTAGCTACAACGA TCAGTCGA | 4521 |
| 1360 | UGCUGCAG A CAGUUGAG | 1718 | CTCAACTG GGCTAGCTACAACGA CTGCAGCA | 4522 |
| 1387 | GGGUUGGG A UGGUGACA | 1719 | TGTCACCA GGCTAGCTACAACGA CCCAACCC | 4523 |
| 1393 | GGAUGGUG A CAUUUGAC | 1720 | GTCAAATG GGCTAGCTACAACGA CACCATCC | 4524 |
| 1400 | GACAUUUG A CAGUGCUG | 1721 | CAGCACTG GGCTAGCTACAACGA CAAATGTC | 4525 |
| 1425 | CAAAGUGA A CUCAUACA | 1722 | TGTATGAG GGCTAGCTACAACGA TCACTTTG | 4526 |
| 1435 | UCAUACAG A UAAACAGU | 1723 | ACTGTTTA GGCTAGCTACAACGA CTGTATGA | 4527 |
| 1439 | ACAGAUAA A CAGUGGCA | 1724 | TGCCACTG GGCTAGCTACAACGA TTATCTGT | 4528 |
| 1451 | UGGCAGUG A CAGGGACA | 1725 | TGTCCCTG GGCTAGCTACAACGA CACTGCCA | 4529 |
| 1457 | UGACAGGG A CACACUCG | 1726 | CGAGTGTG GGCTAGCTACAACGA CCCTGTCA | 4530 |
| 1473 | GCCAAAAG A UUACCUGC | 1727 | GCAGGTAA GGCTAGCTACAACGA CTTTTGGC | 4531 |
| 1498 | CAGGAGGG A CGUCCAUC | 1728 | GATGGACG GGCTAGCTACAACGA CCCTCCTG | 4532 |
| 1521 | GGGCUUCG A UCGGCAUU | 1729 | AATGCCGA GGCTAGCTACAACGA CGAAGCCC | 4533 |
| 1537 | UUACUGUG A UUAGGAAG | 1730 | CTTCCTAA GGCTAGCTACAACGA CACAGTAA | 4534 |
| 1548 | AGGAAGAA A UAUCCAAC | 1731 | GTTGGATA GGCTAGCTACAACGA TTCTTCCT | 4535 |
| 1555 | AAUAUCCA A CUGAUGGA | 1732 | TCCATCAG GGCTAGCTACAACGA TGGATATT | 4536 |
| 1559 | UCCAACUG A UGGAUCUG | 1733 | CAGATCCA GGCTAGCTACAACGA CAGTTGGA | 4537 |
| 1563 | ACUGAUGG A UCUGAAAU | 1734 | ATTTCAGA GGCTAGCTACAACGA CCATCAGT | 4538 |
| 1570 | GAUCUGAA A UUGUGCUG | 1735 | CAGCACAA GGCTAGCTACAACGA TTCAGATC | 4539 |
| 1582 | UGCUGCUG A CGGAUGGG | 1736 | CCCATCCG GGCTAGCTACAACGA CAGCAGCA | 4540 |
| 1586 | GCUGACGG A UGGGGAAG | 1737 | CTTCCCCA GGCTAGCTACAACGA CCGTCAGC | 4541 |
| 1595 | UGGGGAAG A CAACACUA | 1738 | TAGTGTTG GGCTAGCTACAACGA CTTCCCCA | 4542 |
| 1598 | GGAAGACA A CACUAUAA | 1739 | TTATAGTG GGCTAGCTACAACGA TGTCTTCC | 4543 |
| 1619 | GUGCUUUA A CGAGGUCA | 1740 | TGACCTCG GGCTAGCTACAACGA TAAAGCAC | 4544 |
| 1629 | GAGGUCAA A CAAAGUGG | 1741 | CCACTTTG GGCTAGCTACAACGA TTGACCTC | 4545 |
| 1683 | GCUCAAGA A CUAGAGGA | 1742 | TCCTCTAG GGCTAGCTACAACGA TCTTGAGC | 4546 |
| 1702 | UGUCCAAA A UGACAGGA | 1743 | TCCTGTCA GGCTAGCTACAACGA TTTGGACA | 4547 |
| 1705 | CCAAAAUG A CAGGAGGU | 1744 | ACCTCCTG GGCTAGCTACAACGA CATTTTGG | 4548 |
| 1720 | GUUUACAG A CAUAUGCU | 1745 | AGCATATG GGCTAGCTACAACGA CTGTAAAC | 4549 |
| 1733 | UGCUUCAG A UCAAGUUC | 1746 | GAACTTGA GGCTAGCTACAACGA CTGAAGCA | 4550 |
| 1745 | AGUUCAGA A CAAUGGCC | 1747 | GGCCATTG GGCTAGCTACAACGA TCTGAACT | 4551 |
| 1748 | UCAGAACA A UGGCCUCA | 1748 | TGAGGCCA GGCTAGCTACAACGA TGTTCTGA | 4552 |
| 1760 | CCUCAUUG A UGCUUUUG | 1749 | CAAAAGCA GGCTAGCTACAACGA CAATGAGG | 4553 |
| 1787 | AUCAGGAA A UGGAGCUG | 1750 | CAGCTCCA GGCTAGCTACAACGA TTCCTGAT | 4554 |
| 1830 | AGUAAGGG A UUAACCCU | 1751 | AGGGTTAA GGCTAGCTACAACGA CCCTTACT | 4555 |
| 1834 | AGGGAUUA A CCCUCCAG | 1752 | CTGGAGGG GGCTAGCTACAACGA TAATCCCT | 4556 |
| 1844 | CCUCCAGA A CAGCCAGU | 1753 | ACTGGCTG GGCTAGCTACAACGA TCTGGAGG | 4557 |
| 1855 | GCCAGUGG A UGAAUGGC | 1754 | GCCATTCA GGCTAGCTACAACGA CCACTGGC | 4558 |
| 1859 | GUGGAUGA A UGGCACAG | 1755 | CTGTGCCA GGCTAGCTACAACGA TCATCCAC | 4559 |
| 1870 | GCACAGUG A UCGUGGAC | 1756 | GTCCACGA GGCTAGCTACAACGA CACTGTGC | 4560 |
| 1877 | GAUCGUGG A CAGCACCG | 1757 | CGGTGCTG GGCTAGCTACAACGA CCACGATC | 4561 |
| 1895 | GGGAAAGG A CACUUUGU | 1758 | ACAAAGTG GGCTAGCTACAACGA CCTTTCCC | 4562 |
| 1918 | UCACCUGG A CAACGCAG | 1759 | CTGCGTTG GGCTAGCTACAACGA CCAGGTGA | 4563 |
| 1921 | CCUGGACA A CGCAGCCU | 1760 | AGGCTGCG GGCTAGCTACAACGA TGTCCAGG | 4564 |
| 1936 | CUCCCCAA A UCCUUCUC | 1761 | GAGAAGGA GGCTAGCTACAACGA TTGGGGAG | 4565 |
| 1949 | UCUCUGGG A UCCCAGUG | 1762 | CACTGGGA GGCTAGCTACAACGA CCCAGAGA | 4566 |
| 1959 | CCCAGUGG A CAGAAGCA | 1763 | TGCTTCTG GGCTAGCTACAACGA CCACTGGG | 4567 |
| 1985 | UGUAGUGG A CAAAAACA | 1764 | TGTTTTTG GGCTAGCTACAACGA CCACTACA | 4568 |
| 1991 | GGACAAAA A CACCAAAA | 1765 | TTTTGGTG GGCTAGCTACAACGA TTTTGTCC | 4569 |
| 1999 | ACACCAAA A UGGCCUAC | 1766 | GTAGGCCA GGCTAGCTACAACGA TTTGGTGT | 4570 |
| 2014 | ACCUCCAA A UCCCAGGC | 1767 | GCCTGGGA GGCTAGCTACAACGA TTGGAGGT | 4571 |
| 2046 | ACUUGGAA A UACAGUCU | 1768 | AGACTGTA GGCTAGCTACAACGA TTCCAAGT | 4572 |
| 2071 | GCUCACAA A CCUUGACC | 1769 | GGTCAAGG GGCTAGCTACAACGA TTGTGAGC | 4573 |
| 2077 | AAACCUUG A CCCUGACU | 1770 | AGTCAGGG GGCTAGCTACAACGA CAAGGTTT | 4574 |
| 2083 | UGACCCUG A CUGUCACG | 1771 | CGTGACAG GGCTAGCTACAACGA CAGGGTCA | 4575 |
| 2105 | UGCGUCCA A UGCUACCC | 1772 | GGGTAGCA GGCTAGCTACAACGA TGGACGCA | 4576 |
| 2122 | UGCCUCCA A UUACAGUG | 1773 | CACTGTAA GGCTAGCTACAACGA TGGAGGCA | 4577 |
| 2131 | UUACAGUG A CUUCCAAA | 1774 | TTTGGAAG GGCTAGCTACAACGA CACTGTAA | 4578 |
| 2140 | CUUCCAAA A CGAACAAG | 1775 | CTTGTTCG GGCTAGCTACAACGA TTTGGAAG | 4579 |
| 2144 | CAAAACGA A CAAGGACA | 1776 | TGTCCTTG GGCTAGCTACAACGA TCGTTTTG | 4580 |
| 2150 | GAACAAGG A CACCAGCA | 1777 | TGCTGGTG GGCTAGCTACAACGA CCTTGTTC | 4581 |
| 2160 | ACCAGCAA A UUCCCCAG | 1778 | CTGGGGAA GGCTAGCTACAACGA TTGCTGGT | 4582 |
| 2189 | UUAUGCAA A UAUUCGCC | 1779 | GGCGAATA GGCTAGCTACAACGA TTGCATAA | 4583 |
| 2212 | CCUCCCCA A UUCUCAGG | 1780 | CCTGAGAA GGCTAGCTACAACGA TGGGGAGG | 4584 |
| 2239 | CAGCCCUG A UUGAAUCA | 1781 | TGATTCAA GGCTAGCTACAACGA CAGGGCTG | 4585 |
| 2244 | CUGAUUGA A UCAGUGAA | 1782 | TTCACTGA GGCTAGCTACAACGA TCAATCAG | 4586 |
| 2252 | AUCAGUGA A UGGAAAAA | 1783 | TTTTTCCA GGCTAGCTACAACGA TCACTGAT | 4587 |
| 2260 | AUGGAAAA A CAGUUACC | 1784 | GGTAACTG GGCTAGCTACAACGA TTTTCCAT | 4588 |
| 2274 | ACCUUGGA A CUACUGGA | 1785 | TCCAGTAG GGCTAGCTACAACGA TCCAAGGT | 4589 |
| 2282 | ACUACUGG A UAAUGGAG | 1786 | CTCCATTA GGCTAGCTACAACGA CCAGTAGT | 4590 |
| 2285 | ACUGGAUA A UGGAGCAG | 1787 | CTGCTCCA GGCTAGCTACAACGA TATCCAGT | 4591 |
| 2300 | AGGUGCUG A UGCUACUA | 1788 | TAGTAGCA GGCTAGCTACAACGA CAGCACCT | 4592 |
| 2312 | UACUAAGG A UGACGGUG | 1789 | CACCGTCA GGCTAGCTACAACGA CCTTAGTA | 4593 |
| 2315 | UAAGGAUG A CGGUGUCU | 1790 | AGACACCG GGCTAGCTACAACGA CATCCTTA | 4594 |
| 2341 | AUUUCACA A CUUAUGAC | 1791 | GTCATAAG GGCTAGCTACAACGA TGTGAAAT | 4595 |
| 2348 | AACUUAUG A CACGAAUG | 1792 | CATTCGTG GGCTAGCTACAACGA CATAAGTT | 4596 |
| 2354 | UGACACCA A UGGUAGAU | 1793 | ATCTACCA GGCTAGCTACAACGA TCGTGTCA | 4597 |
| 2361 | AAUGGUAG A UACAGUGU | 1794 | ACACTGTA GGCTAGCTACAACGA CTACCATT | 4598 |
| 2396 | AGGAGUUA A CGCAGCCA | 1795 | TGGCTGCG GGCTAGCTACAACGA TAACTCCT | 4599 |
| 2406 | GCAGCCAG A CGGAGAGU | 1796 | ACTCTCCG GGCTAGCTACAACGA CTGGCTGC | 4600 |
| 2416 | GGAGAGUG A UACCCCAG | 1797 | CTGGGGTA GGCTAGCTACAACGA CACTCTCC | 4601 |
| 2455 | CUGGCUGG A UUGAGAAU | 1798 | ATTCTCAA GGCTAGCTACAACGA CCAGCCAG | 4602 |
| 2462 | GAUUGAGA A UGAUGAAA | 1799 | TTTCATCA GGCTAGCTACAACGA TCTCAATC | 4603 |
| 2465 | UGAGAAUG A UGAAAUAC | 1800 | GTATTTCA GGCTAGCTACAACGA CATTCTCA | 4604 |
| 2470 | AUGAUGA A AUCAAUGG | 1801 | CCATTGTA GGCTAGCTACAACGA TTCATCAT | 4605 |
| 2475 | GAAAUACA A UGGAAUCC | 1802 | GGATTCCA GGCTAGCTACAACGA TGTATTTC | 4606 |
| 2480 | ACAAUGGA A UCCACCAA | 1803 | TTGGTGGA GGCTAGCTACAACGA TCCATTGT | 4607 |
| 2490 | CCACCAAG A CCUGAAAU | 1804 | ATTTCAGG GGCTAGCTACAACGA CTTGGTGG | 4608 |
| 2497 | GACCUGAA A UUAAUAAG | 1805 | CTTATTAA GGCTAGCTACAACGA TTCAGGTC | 4609 |
| 2501 | UGAAAUUA A UAAGGAUG | 1806 | CATCCTTA GGCTAGCTACAACGA TAATTTCA | 4610 |
| 2507 | UAAUAAGG A UGAUGUUC | 1807 | GAACATCA GGCTAGCTACAACGA CCTTATTA | 4611 |
| 2510 | UAAGGAUG A UGUUCAAC | 1808 | GTTGAACA GGCTAGCTACAACGA CATCCTTA | 4612 |
| 2517 | GAUGUUCA A CACAAGCA | 1809 | TGCTTGTG GGCTAGCTACAACGA TGAACATC | 4613 |
| 2542 | UCAGCAGA A CAUCCUCG | 1810 | CGAGGATG GGCTAGCTACAACGA TCTGCTGA | 4614 |
| 2573 | GGCUUCUG A UGUCCCAA | 1811 | TTGGGACA GGCTAGCTACAACGA CAGAAGCC | 4615 |
| 2582 | UGUCCCAA A UGCUCCCA | 1812 | TGGGAGCA GGCTAGCTACAACGA TTGGGACA | 4616 |
| 2597 | CAUACCUG A UCUCUUCC | 1813 | GGAAGAGA GGCTAGCTACAACGA CAGGTATG | 4617 |
| 2617 | CUGGCCAA A UCACCGAC | 1814 | GTCGGTGA GGCTAGCTACAACGA TTGGCCAG | 4618 |
| 2624 | AAUCACCG A CCUGAAGG | 1815 | CCTTCAGG GGCTAGCTACAACGA CGGTGATT | 4619 |
| 2638 | AGGCGGAA A UUCACGGG | 1816 | CCCGTGAA GGCTAGCTACAACGA TTCCGCCT | 4620 |
| 2660 | UCUCAUUA A UCUGACUU | 1817 | AAGTCAGA GGCTAGCTACAACGA TAATGAGA | 4621 |
| 2665 | UUAAUCUG A CUUGGACA | 1818 | TGTCCAAG GGCTAGCTACAACGA CAGATTAA | 4622 |
| 2671 | UGACUUGG A CAGCUCCU | 1819 | AGGAGCTG GGCTAGCTACAACGA CCAAGTCA | 4623 |
| 2684 | UCCUGGGG A UGAUUAUG | 1820 | CATAATCA GGCTAGCTACAACGA CCCCAGGA | 4624 |
| 2687 | UGGGGAUG A UUAUGACC | 1821 | GGTCATAA GGCTAGCTACAACGA CATCCCCA | 4625 |
| 2693 | UGAUUAUG A CCAUGGAA | 1822 | TTCCATGG GGCTAGCTACAACGA CATAATCA | 4626 |
| 2701 | ACCAUGGA A CAGCUCAC | 1823 | GTGAGCTG GGCTAGCTACAACGA TCCATGGT | 4627 |
| 2725 | UCAUUCGA A UAAGUACA | 1824 | TGTACTTA GGCTAGCTACAACGA TCGAATGA | 4628 |
| 2744 | UAUUCUUG A UCUCAGAG | 1825 | CTCTGAGA GGCTAGCTACAACGA CAAGAATA | 4629 |
| 2753 | UCUCAGAG A CAAGUUCA | 1826 | TGAACTTG GGCTAGCTACAACGA CTCTGAGA | 4630 |
| 2762 | CAAGUUCA A UGAAUCUC | 1827 | GAGATTCA GGCTAGCTACAACGA TGAACTTG | 4631 |
| 2766 | UUCAAUGA A UCUCUUCA | 1828 | TGAAGAGA GGCTAGCTACAACGA TCATTGAA | 4632 |
| 2780 | UCAAGUGA A UACUACUG | 1829 | CAGTAGTA GGCTAGCTACAACGA TCACTTGA | 4633 |
| 2810 | GGAAGCCA A CUCUGAGG | 1830 | CCTCAGAG GGCTAGCTACAACGA TGGCTTCC | 4634 |
| 2835 | UUGUUUAA A CCAGAAAA | 1831 | TTTTCTGG GGCTAGCTACAACGA TTAAACAA | 4635 |
| 2843 | ACCAGAAA A CAUUACUU | 1832 | AAGTAATG GGCTAGCTACAACGA TTTCTGGT | 4636 |
| 2858 | UUUUGAAA A UGGCACAG | 1833 | CTGTGCCA GGCTAGCTACAACGA TTTCAAAA | 4637 |
| 2867 | UGGCACAG A UCUUUUCA | 1834 | TGAAAAGA GGCTAGCTACAACGA CTGTGCCA | 4638 |
| 2894 | GGCUGUUG A UAAGGUCG | 1835 | CGACCTTA GGCTAGCTACAACGA CAACAGCC | 4639 |
| 2903 | UAAGGUCG A UCUGAAAU | 1836 | ATTTCAGA GGCTAGCTACAACGA CGACCTTA | 4640 |
| 2910 | GAUCUGAA A UCAGAAAU | 1837 | ATTTCTGA GGCTAGCTACAACGA TTCAGATC | 4641 |
| 2917 | AAUCAGAA A UAUCCAAC | 1838 | GTTGGATA GGCTAGCTACAACGA TTCTGATT | 4642 |
| 2924 | AAUAUCCA A CAUUGCAC | 1839 | GTGCAATG GGCTAGCTACAACGA TGGATATT | 4643 |
| 2959 | CUCCACAG A CUCCGCCA | 1840 | TGGCGGAG GGCTAGCTACAACGA CTGTGGAG | 4644 |
| 2971 | CGCCAGAG A CACCUAGU | 1841 | ACTAGGTG GGCTAGCTACAACGA CTCTGGCG | 4645 |
| 2984 | UAGUCCUG A UGAAACGU | 1842 | ACGTTTCA GGCTAGCTACAACGA CAGGACTA | 4646 |
| 2989 | CUGAUGAA A CGUCUGCU | 1843 | AGCAGACG GGCTAGCTACAACGA TTCATCAG | 4647 |
| 3008 | UUGUCCUA A UAUUCAUA | 1844 | TATGAATA GGCTAGCTACAACGA TAGGACAA | 4648 |
| 3020 | UCAUAUCA A CAGCACCA | 1845 | TGGTGCTG GGCTAGCTACAACGA TGATATGA | 4649 |
| 3052 | UUUUAAAA A UUAUGUGG | 1846 | CCACATAA GGCTAGCTACAACGA TTTTAAAA | 4650 |
| 3067 | GGAAGUGG A UAGGAGAA | 1847 | TTCTCCTA GGCTAGCTACAACGA CCACTTCC | 4651 |
| 3075 | AUAGGAGA A CUGCAGCU | 1848 | AGCTGCAG GGCTAGCTACAACGA TCTCCTAT | 4652 |
| 3088 | AGCUGUCA A UAGCCUAG | 1849 | CTAGGCTA GGCTAGCTACAACGA TGACAGCT | 4653 |
| 3103 | AGGGCUGA A UUUUUGUC | 1850 | GACAAAAA GGCTAGCTACAACGA TCAGCCCT | 4654 |
| 3114 | UUUGUCAG A UAAAUAAA | 1851 | TTTATTTA GGCTAGCTACAACGA CTGACAAA | 4655 |
| 3118 | UCAGAUAA A UAAAAUAA | 1852 | TTATTTTA GGCTAGCTACAACGA TTATCTGA | 4656 |
| 3123 | UAAAUAAA A UAAAUCAU | 1853 | ATGATTTA GGCTAGCTACAACGA TTTATTTA | 4657 |
| 3127 | UAAAAUAA A UCAUUCAU | 1854 | ATGAATGA GGCTAGCTACAACGA TTATTTTA | 4658 |
| 3146 | UUUUUUUG A UUAUAAAA | 1855 | TTTTATAA GGCTAGCTACAACGA CAAAAAAA | 4659 |
| 3154 | AUUAUAAA A UUUUCUAA | 1856 | TTAGAAAA GGCTAGCTACAACGA TTTATAAT | 4660 |
| 3164 | UUUCUAAA A UGUAUUUU | 1857 | AAAATACA GGCTAGCTACAACGA TTTAGAAA | 4661 |
| 3175 | UAUUUUAG A CUUCCUGU | 1858 | ACAGGAAG GGCTAGCTACAACGA CTAAAATA | 4662 |
| 3265 | UAUUUUAG A CUUCCUGU | 1858 | ACAGGAAG GGCTAGCTACAACGA CTAAAATA | 4662 |
| 3192 | AGGGGGCG A UAUACUAA | 1859 | TTAGTATA GGCTAGCTACAACGA CGCCCCCT | 4663 |
| 3245 | AGGGGGCG A UAUACUAA | 1859 | TTAGTATA GGCTAGCTACAACGA CGCCCCCT | 4663 |
| 3201 | UAUACUAA A UGUAUAUA | 1860 | TATATACA GGCTAGCTACAACGA TTAGTATA | 4664 |
| 3225 | UAUACUAA A UGUAUUCC | 1861 | GGAATACA GCCTAGCTACAACGA TTAGTATA | 4665 |
| 3254 | UAUACUAA A UGUAUUUU | 1862 | AAAATACA GGCTAGCTACAACGA TTAGTATA | 4666 |
| 3282 | AGGGGGCG A UAAAAUAA | 1863 | TTATTTTA GGCTAGCTACAACGA CGCCCCCT | 4667 |
| 3287 | GCGAUAAA A UAAAAUGC | 1864 | GCATTTTA GGCTAGCTACAACGA TTTATCGC | 4668 |
| 3292 | AAAAUAAA A UGCUAAAC | 1865 | GTTTAGCA GGCTAGCTACAACGA TTTATTTT | 4669 |
| 3299 | AAUGCUAA A CAACUGGG | 1866 | CCCAGTTG GGCTAGCTACAACGA TTAGCATT | 4670 |
| 3302 | GCUAAACA A CUGGGUAA | 1867 | TTACCCAG GGCTAGCTACAACGA TGTTTAGC | 4671 |

Input Sequence = NM_001285. Cut Site = R/Y
Arm Length = 8. Core Sequence = GGCTAGCTACAACGA
NM_001285 (Homo sapiens chloride channel, calcium activated, 1 (CLCA1) mRNA, 3311 bp)

[0195] TABLE VIII

| | | Human CLCA1 Amberzyme and Target Sequence 249.021 | | |
|---|---|---|---|---|
| | | | | Rz |
| | | Seq | | Seq |
| | | ID | | ID |
| Pos | Substrate | No. | Amberzyme | No. |
| 40 | AUAUAAUU G AAUAUUUU | 1211 | AAAAUAUU GGA GCCGUUAGGC UCCCUUCAAGGA GCCGUUAGGC UCCGGG AAUUAUAU | 4672 |
| 67 | GGGAGCAU G AAGAGGUG | 1212 | CACCUCUU GGA GCCGUUAGGC UCCCUUCAAGGA GCCGUUAGGC UCCGGG AUGCUCCC | 4673 |
| 78 | GAGGUGUU G AGGUUAUG | 1213 | CAUAACCU GGA GCCGUUAGGC UCCCUUCAAGGA GCCGUUAGGC UCCGGG AACACCUC | 4674 |
| 106 | GCACAGCU G AAGGCAGA | 1214 | UCUGCCUU GGA GCCGUUAGGC UCCCUUCAAGGA GCCGUUAGGC UCCGGG AGCUGUGC | 4675 |
| 134 | ACAAGUAC G CAAUUUGA | 1215 | UCAAAUUG GGA GCCGUUAGGC UCCCUUCAAGGA GCCGUUAGGC UCCGGG GUACUUGU | 4676 |
| 141 | CGCAAUUU G AGACUAAG | 1216 | CUUAGUCU GGA GCCGUUAGGC UCCCUUCAAGGA GCCGUUAGGC UCCGGG AAAUUGCG | 4677 |
| 172 | CUCCUAUU G AAGACAAG | 1217 | CUUGUCUU GGA GCCGUUAGGC UCCCUUCAAGGA GCCGUUAGGC UCCGGG AAUAGGAG | 4678 |
| 223 | AGACCUGU G AUAAACCA | 1218 | UGGUUUAU GGA GCCGUUAGGC UCCCUUCAAGGA GCCGUUAGGC UCCGGG ACAGGUCU | 4679 |
| 237 | CCACUUCC G AUAAGUUG | 1219 | CAACUUAU GGA GCCGUUAGGC UCCCUUCAAGGA GCCGUUAGGC UCCGGG GGAAGUGG | 4680 |
| 312 | CGUAACCC G CAUUUUCC | 1220 | GGAAAAUG GGA GCCGUUAGGC UCCCUUCAAGGA GCCGUUAGGC UCCGGG GGGUUACG | 4681 |
| 384 | UUCAUCUU G AUUCUUCA | 1221 | UGAAGAAU GGA GCCGUUAGGC UCCCUUCAAGGA GCCGUUAGGC UCCGGG AAGAUGAA | 4682 |
| 411 | GGGGCCCU G AGUAAUUC | 1222 | GAAUUACU GGA GCCGUUAGGC UCCCUUCAAGGA GCCGUUAGGC UCCGGG AGGGCCCC | 4683 |
| 432 | AUUCAGCU G AACAACAA | 1223 | UUGUUGUU GGA GCCGUUAGGC UCCCUUCAAGGA GCCGUUAGGC UCCGGG AGCUGAAU | 4684 |
| 448 | AUGGCUAU G AAGGCAUU | 1224 | AAUGCCUU GGA GCCGUUAGGC UCCCUUCAAGGA GCCGUUAGGC UCCGGG AUAGCCAU | 4685 |
| 463 | UUGUCGUU G CAAUCGAC | 1225 | GUCGAUUG GGA GCCGUUAGGC UCCCUUCAAGGA GCCGUUAGGC UCCGGG AACGACAA | 4686 |
| 469 | UUGCAAUC G ACCCCAAU | 1226 | AUUGGGGU GGA GCCGUUAGGC UCCCUUCAAGGA GCCGUUAGGC UCCGGG GAUUGCAA | 4687 |
| 480 | CCCAAUGU G CCAGAAGA | 1227 | UCUUCUGG GGA GCCGUUAGGC UCCCUUCAAGGA GCCGUUAGGC UCCGGG ACAUUGGG | 4688 |
| 490 | CAGAAGAU G AAACACUC | 1228 | GAGUGUUU GGA GCCGUUAGGC UCCCUUCAAGGA GCCGUUAGGC UCCGGG AUCUUCUG | 4689 |
| 522 | GACAUGGU G ACCCAGGC | 1229 | GCCUGGGU GGA GCCGUUAGGC UCCCUUCAAGGA GCCGUUAGGC UCCGGG ACCAUGUC | 4690 |
| 547 | AUCUGUUU G AAGCUACA | 1230 | UGUAGCUU GGA GCCGUUAGGC UCCCUUCAAGGA GCCGUUAGGC UCCGGG AAACAGAU | 4691 |
| 563 | AGGAAAGC G AUUUUAUU | 1231 | AAUAAAAU GGA GCCGUUAGGC UCCCUUCAAGGA GCCGUUAGGC UCCGGG GCUUUCCU | 4692 |
| 583 | AAAAUGUU G CCAUUUUG | 1232 | CAAAAUGG GGA GCCGUUAGGC UCCCUUCAAGGA GCCGUUAGGC UCCGGG AACAUUUU | 4693 |
| 591 | GCCAUUUU G AUUCCUGA | 1233 | UCAGGAAU GGA GCCGUUAGGC UCCCUUCAAGGA GCCGUUAGGC UCCGGG AAAAUGGC | 4694 |
| 598 | UGAUUCCU G AAACAUGG | 1234 | CCAUGUUU GGA GCCGUUAGGC UCCCUUCAAGGA GCCGUUAGGC UCCGGG AGGAAUCA | 4695 |
| 619 | CAAAGGCU G ACUAUGUG | 1235 | CACAUAGU GGA GCCGUUAGGC UCCCUUCAAGGA GCCGUUAGGC UCCGGG AGCCUUUG | 4696 |
| 627 | GACUAUGU G AGACCAAA | 1236 | UUUGGUCU GGA GCCGUUAGGC UCCCUUCAAGGA GCCGUUAGGC UCCGGG ACAUAGUC | 4697 |
| 640 | CAAAACUU G AGACCUAC | 1237 | GUAGGUCU GGA GCCGUUAGGC UCCCUUCAAGGA GCCGUUAGGC UCCGGG AAGUUUUG | 4698 |
| 655 | ACAAAAAU G CUGAUGUU | 1238 | AACAUCAG GGA GCCGUUAGGC UCCCUUCAAGGA GCCGUUAGGC UCCGGG AUUUUUGU | 4699 |
| 658 | AAAAUGCU G AUGUUCUG | 1239 | CAGAACAU GGA GCCGUUAGGC UCCCUUCAAGGA GCCGUUAGGC UCCGGG AGCAUUUU | 4700 |
| 670 | UUCUGGUU G CUGAGUCU | 1240 | AGACUCAG GGA GCCGUUAGGC UCCCUUCAAGGA GCCGUUAGGC UCCGGG AACCAGAA | 4701 |
| 673 | UGGUUGCU G AGUCUACU | 1241 | AGUAGACU GGA GCCGUUAGGC UCCCUUCAAGGA GCCGUUAGGC UCCGGG AGCAACCA | 4702 |
| 694 | CAGGUAAU G AUGAACCC | 1242 | GGGUUCAU GGA GCCGUUAGGC UCCCUUCAAGGA GCCGUUAGGC UCCGGG AUUACCUG | 4703 |
| 697 | GUAAUGAU G AACCCUAC | 1243 | GUAGGGUU GGA GCCGUUAGGC UCCCUUCAAGGA GCCGUUAGGC UCCGGG AUCAUUAC | 4704 |
| 709 | CCUACACU G AGCAGAUG | 1244 | CAUCUGCU GGA GCCGUUAGGC UCCCUUCAAGGA GCCGUUAGGC UCCGGG AGUGUAGG | 4705 |
| 739 | AGAAGGGU G AAAGGAUC | 1245 | GAUCCUUU GGA GCCGUUAGGC UCCCUUCAAGGA GCCGUUAGGC UCCGGG ACCCUUCU | 4706 |
| 760 | UCACUCCU G AUUUCAUU | 1246 | AAUGAAAU GGA GCCGUUAGGC UCCCUUCAAGGA GCCGUUAGGC UCCGGG AGGAGUGA | 4707 |
| 769 | AUUUCAUU G CAGGAAAA | 1247 | UUUUCCUG GGA GCCGUUAGGC UCCCUUCAAGGA GCCGUUAGGC UCCGGG AAUGAAAU | 4708 |
| 787 | AGUUAGCU G AAUAUGGA | 1248 | UCCAUAUU GGA GCCGUUAGGC UCCCUUCAAGGA GCCGUUAGGC UCCGGG AGCUAACU | 4709 |
| 820 | UUGUCCAU G AGUGGGCU | 1249 | AGCCCACU GGA GCCGUUAGGC UCCCUUCAAGGA GCCGUUAGGC UCCGGG AUGGACAA | 4710 |
| 836 | UCAUCUAC G AUGGGGAG | 1250 | CUCCCCAU GGA GCCGUUAGGC UCCCUUCAAGGA GCCGUUAGGC UCCGGG GUAGAUGA | 4711 |
| 850 | GAGUAUUU G ACGAGUAC | 1251 | GUACUCGU GGA GCCGUUAGGC UCCCUUCAAGGA GCCGUUAGGC UCCGGG AAAUACUC | 4712 |
| 853 | UAUUUGAC G AGUACAAU | 1252 | AUUGUACU GGA GCCGUUAGGC UCCCUUCAAGGA GCCGUUAGGC UCCGGG GUCAAAUA | 4713 |
| 865 | ACAAUAAU G AUGAGAAA | 1253 | UUUCUCAU GGA GCCGUUAGGC UCCCUUCAAGGA GCCGUUAGGC UCCGGG AUUAUUGU | 4714 |
| 868 | AUAAUGAU G AGAAAUUC | 1254 | GAAUUUCU GGA GCCGUUAGGC UCCCUUCAAGGA GCCGUUAGGC UCCGGG AUCAUUAU | 4715 |
| 980 | CAAAAGAU G CACAUUCA | 1255 | UGAAUGUG GGA GCCGUUAGGC UCCCUUCAAGGA GCCGUUAGGC UCCGGG AUCUUUUG | 4716 |
| 1009 | GACUCUAU G AAAAAGGA | 1256 | UCCUUUUU GGA GCCGUGAGGC UCCCUUCAAGGA GCCGUUAGGC UCCGGG AUAGAGUC | 4717 |
| 1021 | AAGGAUGU G AGUUUGUU | 1257 | AACAAACU GGA GCCGUUAGGC UCCCUUCAAGGA GCCGUUAGGC UCCGGG ACAUCCUU | 4718 |
| 1040 | CCAAUCCC G CCAGACGG | 1258 | CCGUCUGG GGA GCCGUUAGGC UCCCUUCAAGGA GCCGUUAGGC UCCGGG GGGAUUGG | 4719 |
| 1069 | UAAUGUUU G CACAACAU | 1259 | AUGUUGUG GGA GCCGUUAGGC UCCCUUCAAGGA GCCGUUAGGC UCCGGG AAACAUUA | 4720 |
| 1081 | AACAUGUU G AUUCUAUA | 1260 | UAUAGAAU GGA GCCGUUAGGC UCCCUUCAAGGA GCCGUUAGGC UCCGGG AACAUGUU | 4721 |
| 1093 | CUAUAGUU G AAUUCUGU | 1261 | ACAGAAUU GGA GCCGUUAGGC UCCCUUCAAGGA GCCGUUAGGC UCCGGG AACUAUAG | 4722 |
| 1151 | UCAAAAAU G CAAUCUCC | 1262 | GGAGAUUG GGA GCCGUUAGGC UCCCUUCAAGGA GCCGUUAGGC UCCGGG AUUUUUGA | 4723 |
| 1160 | CAAUCUCC G AAGCACAU | 1263 | AUGUGCUU GGA GCCGUUAGGC UCCCUUCAAGGA GCCGUUAGGC UCCGGG GGAGAUUG | 4724 |
| 1176 | UGGGAAGU G AUCCGUGA | 1264 | UCACGGAU GGA GCCGUUAGGC UCCCUUCAAGGA GCCGUUAGGC UCCGGG ACUUCCCA | 4725 |
| 1183 | UGAUCCGU G AUUCUGAG | 1265 | CUCAGAAU GGA GCCGUUAGGC UCCCUUCAAGGA GCCGUUAGGC UCCGGG ACGGAUCA | 4726 |
| 1189 | GUGAUUCU G AGGACUUU | 1266 | AAAGUCCU GGA GCCGUUAGGC UCCCUUCAAGGA GCCGUUAGGC UCCGGG AGAAUCAC | 4727 |
| 1215 | ACUCCUAU G ACAACACA | 1267 | UGUGUUGU GGA GCCGUGAGGC UCCCUUCAAGGA GCCGUUAGGC UCCGGG AUAGGAGU | 4728 |
| 1248 | UUCUCAUU G CUGCAGAU | 1268 | AUCUGCAG GGA GCCGUUAGGC UCCCUUCAAGGA GCCGUUAGGC UCCGGG AAUGAGAA | 4729 |
| 1251 | UCAUUGCU G CAGAUUGG | 1269 | CCAAUCUG GGA GCCGUUAGGC UCCCUUCAAGGA GCCGUUAGGC UCCGGG AGCAAUGA | 4730 |
| 1285 | UACUCCUU G ACAAAUCU | 1270 | AGAUUUGU GGA GCCGUUAGGC UCCCUUCAAGGA GCCGUUAGGC UCCGGG AAGGACUA | 4731 |
| 1305 | AGCAUGGC G ACUGGUAA | 1271 | UUACCAGU GGA GCCGUUAGGC UCCCUUCAAGGA GCCGUUAGGC UCCGGG GCCAUGCU | 4732 |
| 1316 | UGGUAACC G CCUCAAUC | 1272 | GAUUGAGG GGA GCCGUUAGGC UCCCUUCAAGGA GCCGUUAGGC UCCGGG GGUUACCA | 4733 |
| 1325 | CCUCAAUC G ACUGAAUC | 1273 | GAUUCAGU GGA GCCGUUAGGC UCCCUUCAAGGA GCCGUUAGGC UCCGGG GAUUGAGG | 4734 |
| 1329 | AAUCGACU G AAUCAAGC | 1274 | GCUUGAUU GGA GCCGUUAGGC UCCCUUCAAGGA GCCGUUAGGC UCCGGG AGUCGAUU | 4735 |
| 1353 | CUUUUCCU G CUGCAGAC | 1275 | GUCUGCAG GGA GCCGUUAGGC UCCCUUCAAGGA GCCGUUAGGC UCCGGG AGGAAAAG | 4736 |
| 1356 | UUCCUGCU G CAGACAGU | 1276 | ACUGUCUG GGA GCCGUUAGGC UCCCUUCAAGGA GCCGUUAGGC UCCGGG AGCAGGAA | 4737 |
| 1366 | AGACAGUU G AGCUGGGG | 1277 | CCCCAGCU GGA GCCGUUAGGC UCCCUUCAAGGA GCCGUUAGGC UCCGGG AACUGUCU | 4738 |
| 1392 | GGGAUGGU G ACAUUUGA | 1278 | UCAAAUGU GGA GCCGUUAGGC UCCCUUCAAGGA GCCGUUAGGC UCCGGG ACCAUCCC | 4739 |
| 1399 | UGACAUUU G ACAGUGCU | 1279 | AGCACUGU GGA GCCGUUAGGC UCCCUUCAAGGA GCCGUUAGGC UCCGGG AAAUGUCA | 4740 |
| 1405 | UUGACAGU G CUGCCCAU | 1280 | AUGGGCAG GGA GCCGUUAGGC UCCCUUCAAGGA GCCGUUAGGC UCCGGG ACUGUCAA | 4741 |
| 1408 | ACAGUGCU G CCCAUGUA | 1281 | UACAUGGG GGA GCCGUUAGGC UCCCUUCAAGGA GCCGUUAGGC UCCGGG AGCACUGU | 4742 |
| 1423 | UACAAAGU G AACUCAUA | 1282 | UAUGAGUU GGA GCCGUUAGGC UCCCUUCAAGGA GCCGUUAGGC UCCGGG ACUUUGUA | 4743 |
| 1450 | GUGGCAGU G ACAGGGAC | 1283 | GUCCCUGU GGA GCCGUUAGGC UCCCUUCAAGGA GCCGUUAGGC UCCGGG ACUGCCAC | 4744 |
| 1465 | ACACACUC G CCAAAAGA | 1284 | UCUUUUGG GGA GCCGUUAGGC UCCCUUCAAGGA GCCGUUAGGC UCCGGG GAGUGUGU | 4745 |
| 1480 | GAUUACCU G CAGCAGCU | 1285 | AGCUGCUG GGA GCCGUUAGGC UCCCUUCAAGGA GCCGUUAGGC UCCGGG AGGUAAUC | 4746 |
| 1508 | GUCCAUCU G CAGCGGGC | 1286 | GCCCGCUG GGA GCCGUUAGGC UCCCUUCAAGGA GCCGUUAGGC UCCGGG AGAUGGAC | 4747 |
| 1520 | CGGGCUUC G AUCGGCAU | 1287 | AUGCCGAU GGA GCCGUUAGGC UCCCUUCAAGGA GCCGUUAGGC UCCGGG GAAGCCCG | 4748 |
| 1536 | UUUACUGU G AUUAGGAA | 1288 | UUCCUAAU GGA GCCGUUAGGC UCCCUUCAAGGA GCCGUUAGGC UCCGGG ACAGUAAA | 4749 |
| 1558 | AUCCAACU G AUGGAUCU | 1289 | AGAUCCAU GGA GCCGUUAGGC UCCCUUCAAGGA GCCGUUAGGC UCCGGG AGUUGGAU | 4750 |
| 1567 | AUGGAUCU G AAAUUGUG | 1290 | CACAAUUU GGA GCCGUUAGGC UCCCUUCAAGGA GCCGUUAGGC UCCGGG AGAUCCAU | 4751 |
| 1575 | GAAAUUGU G CUGCUGAC | 1291 | GUCAGCAG GGA GCCGUUAGGC UCCCUUCAAGGA GCCGUUAGGC UCCGGG ACAAUUUC | 4752 |
| 1578 | AUUGUGCU G CUGACGGA | 1292 | UCCGUCAG GGA GCCGUUAGGC UCCCUUCAAGGA GCCGUUAGGC UCCGGG AGCACAAU | 4753 |
| 1581 | GUGCUGCU G ACGGAUGG | 1293 | CCAUCCGU GGA GCCGUUAGGC UCCCUUCAAGGA GCCGUUAGGC UCCGGG AGCAGCAC | 4754 |
| 1613 | AAGUGGGU G CUUUAACG | 1294 | CGUUAAAG GGA GCCGUUAGGC UCCCUUCAAGGA GCCGUUAGGC UCCGGG ACCCACUU | 4755 |
| 1621 | GCUUUAAC G AGGUCAAA | 1295 | UUUGACCU GGA GCCGUUAGGC UCCCUUCAAGGA GCCGUUAGGC UCCGGG GUUAAAGC | 4756 |
| 1639 | AAAGUGGU G CCAUCAUC | 1296 | GAUGAUGG GGA GCCGUUAGGC UCCCUUCAAGGA GCCGUUAGGC UCCGGG ACCACUUU | 4757 |
| 1657 | ACACAGUC G CUUUGGGG | 1297 | CCCCAAAG GGA GCCGUUAGGC UCCCUUCAAGGA GCCGUUAGGC UCCGGG GACUGUGU | 4758 |
| 1672 | GGCCCUCU G CAGCUCAA | 1298 | UUGAGCUG GGA GCCGUUAGGC UCCCUUCAAGGA GCCGUUAGGC UCCGGG AGAGGGCC | 4759 |
| 1704 | UCCAAAAU G ACAGGAGG | 1299 | CCUCCUGU GGA GCCGUUAGGC UCCCUUCAAGGA GCCGUUAGGC UCCGGG AUUUUGGA | 4760 |
| 1726 | AGACAUAU G CUUCAGAU | 1300 | AUCUGAAG GGA GCCGUUAGGC UCCCUUCAAGGA GCCGUUAGGC UCCGGG AUAUGUCU | 4761 |
| 1759 | GCCUCAUU G AUGCUUUU | 1301 | AAAAGCAU GGA GCCGUUAGGC UCCCUUCAAGGA GCCGUUAGGC UCCGGG AAUGAGGC | 4762 |
| 1762 | UCAUUGAU G CUUUUGGG | 1302 | CCCAAAAG GGA GCCGUUAGGC UCCCUUCAAGGA GCCGUUAGGC UCCGGG AUCAAUGA | 4763 |
| 1805 | CUCUCAGC G CUCCAUCC | 1303 | GGAUGGAG GGA GCCGUUAGGC UCCCUUCAAGGA GCCGUUAGGC UCCGGG GCUGAGAG | 4764 |
| 1819 | UCCAGCUU G AGAGUAAG | 1304 | CUUACUCU GGA GCCGUUAGGC UCCCUUCAAGGA GCCGUUAGGC UCCGGG AAGCUGGA | 4765 |
| 1857 | CAGUGGAU G AAUGGCAC | 1305 | GUGCCAUU GGA GCCGUUAGGC UCCCUUCAAGGA GCCGUUAGGC UCCGGG AUCCACUG | 4766 |
| 1869 | GGCACAGU G AUCGUGGA | 1306 | UCCACGAU GGA GCCGUUAGGC UCCCUUCAAGGA GCCGUUAGGC UCCGGG ACUGUGCC | 4767 |
| 1923 | UGGACAAC G CAGCCUCC | 1307 | GGAGGCUG GGA GCCGUUAGGC UCCCUUCAAGGA GCCGUUAGGC UCCGGG GUUGUCCA | 4768 |
| 2026 | CAGGCAUU G CUAAGGUU | 1308 | AACCUUAG GGA GCCGUUAGGC UCCCUUCAAGGA GCCGUUAGGC UCCGGG AAUGCCUG | 4769 |
| 2055 | UACAGUCU G CAAGCAAG | 1309 | CUUGCUUG GGA GCCGUUAGGC UCCCUUCAAGGA GCCGUUAGGC UCCGGG AGACUGUA | 4770 |
| 2076 | CAAACCUU G ACCCUGAC | 1310 | GUCAGGGU GGA GCCGUUAGGC UCCCUUCAAGGA GCCGUUAGGC UCCGGG AAGGUUUG | 4771 |
| 2082 | UUGACCCU G ACUGUCAC | 1311 | GUGACAGU GGA GCCGUUAGGC UCCCUUCAAGGA GCCGUUAGGC UCCGGG AGGGUCAA | 4772 |
| 2098 | CGUCCCGU G CGUCCAAU | 1312 | AUUGGACG GGA GCCGUUAGGC UCCCUUCAAGGA GCCGUUAGGC UCCGGG ACGGGACG | 4773 |
| 2107 | CGUCCAAU G CUACCCUG | 1313 | CAGGGUAG GGA GCCGUUAGGC UCCCUUCAAGGA GCCGUUAGGC UCCGGG AUUGGACG | 4774 |
| 2115 | GCUACCCU G CCUCCAAU | 1314 | AUUGGAGG GGA GCCGUUAGGC UCCCUUCAAGGA GCCGUUAGGC UCCGGG AGGGUAGC | 4775 |
| 2130 | AUUACAGU G ACUUCCAA | 1315 | UUGGAAGU GGA GCCGUUAGGC UCCCUUCAAGGA GCCGUUAGGC UCCGGG ACUGUAAU | 4776 |
| 2142 | UCCAAAAC G AACAAGGA | 1316 | UCCUUGUU GGA GCCGUUAGGC UCCCUUCAAGGA GCCGUUAGGC UCCGGG GUUUUGGA | 4777 |
| 2185 | UAGUUUAU G CAAAUAUU | 1317 | AAUAUUUG GGA GCCGUUAGGC UCCCUUCAAGGA GCCGUUAGGC UCCGGG AUAAACUA | 4778 |
| 2195 | AAAUAUUC G CCAAGGAG | 1318 | CUCCUUGG GGA GCCGUUAGGC UCCCUUCAAGGA GCCGUUAGGC UCCGGG GAAUAUUU | 4779 |
| 2238 | ACAGCCCU G AUUGAAUC | 1319 | GAUUCAAU GGA GCCGUUAGGC UCCCUUCAAGGA GCCGUUAGGC UCCGGG AGGGCUGU | 4780 |
| 2242 | CCCUGAUU G AAUCAGUG | 1320 | CACUGAUU GGA GCCGUUAGGC UCCCUUCAAGGA GCCGUUAGGC UCCGGG AAUCAGGG | 4781 |
| 2250 | GAAUCAGU G AAUGGAAA | 1321 | UUUCCAUU GGA GCCGUUAGGC UCCCUUCAAGGA GCCGUUAGGC UCCGGG ACUGAUUC | 4782 |
| 2296 | GAGCAGGU G CUGAUGCU | 1322 | AGCAUCAG GGA GCCGUUAGGC UCCCUUCAAGGA GCCGUUAGGC UCCGGG ACCUGCUC | 4783 |
| 2299 | CAGGUGCU G AUGCUACU | 1323 | AGUAGCAU GGA GCCGUUAGGC UCCCUUCAAGGA GCCGUUAGGC UCCGGG AGCACCUG | 4784 |
| 2302 | GUGCUGAU G CUACUAAG | 1324 | CUUAGUAG GGA GCCGUUAGGC UCCCUUCAAGGA GCCGUUAGGC UCCGGG AUCAGCAC | 4785 |
| 2314 | CUAAGGAU G ACGGUGUC | 1325 | GACACCGU GGA GCCGUUAGGC UCCCUUCAAGGA GCCGUUAGGC UCCGGG AUCCUUAG | 4786 |
| 2347 | CAACUUAU G ACACGAAU | 1326 | AUUCGUGU GGA GCCGUUAGGC UCCCUUCAAGGA GCCGUUAGGC UCCGGG AUAAGUUG | 4787 |
| 2352 | UAUGACAC G AAUGGUAG | 1327 | CUACCAUU GGA GCCGUUAGGC UCCCUUCAAGGA GCCGUUAGGC UCCGGG GUGUCAUA | 4788 |
| 2376 | GUAAAAGU G CGGGCUCU | 1328 | AGAGCCCG GGA GCCGUUAGGC UCCCUUCAAGGA GCCGUUAGGC UCCGGG ACUUUUAC | 4789 |
| 2398 | GAGUUAAC G CAGCCAGA | 1329 | UCUGGCUG GGA GCCGUUAGGC UCCCUUCAAGGA GCCGUUAGGC UCCGGG GUUAACUC | 4790 |
| 2415 | CGGAGAGU G AUACCCCA | 1330 | UGGGGUAU GGA GCCGUUAGGC UCCCUUCAAGGA GCCGUUAGGC UCCGGG ACUCUCCG | 4791 |
| 2458 | GCUGGAUU G AGAAUGAU | 1331 | AUCAUUCU GGA GCCGUUAGGC UCCCUUCAAGGA GCCGUUAGGC UCCGGG AAUCCAGC | 4792 |
| 2464 | UUGAGAAU G AUGAAAUA | 1332 | UAUUUCAU GGA GCCGUUAGGC UCCCUUCAAGGA GCCGUUAGGC UCCGGG AUUCUCAA | 4793 |
| 2467 | AGAAUGAU G AAAUACAA | 1333 | UUGUAUUU GGA GCCGUUAGGC UCCCUUCAAGGA GCCGUUAGGC UCCGGG AUCAUUCU | 4794 |
| 2494 | CAAGACCU G AAAUUAAU | 1334 | AUUAAUUU GGA GCCGUUAGGC UCCCUUCAAGGA GCCGUUAGGC UCCGGG AGGUCUUG | 4795 |
| 2509 | AUAAGGAU G AUGUUCAA | 1335 | UUGAACAU GGA GCCGUUAGGC UCCCUUCAAGGA GCCGUUAGGC UCCGGG AUCCUUAU | 4796 |
| 2572 | UGGCUUCU G AUGUCCCA | 1336 | UGGGACAU GGA GCCGUUAGGC UCCCUUCAAGGA GCCGUUAGGC UCCGGG AGAAGCCA | 4797 |
| 2584 | UCCCAAAU G CUCCCAUA | 1337 | UAUGGGAG GGA GCCGUUAGGC UCCCUUCAAGGA GCCGUUAGGC UCCGGG AUUUGGGA | 4798 |
| 2596 | CCAUACCU G AUCUCUUC | 1338 | GAAGAGAU GGA GCCGUUAGGC UCCCUUCAAGGA GCCGUUAGGC UCCGGG AGGUAUGG | 4799 |
| 2623 | AAAUCACC G ACCUGAAG | 1339 | CUUCAGGU GGA GCCGUUAGGC UCCCUUCAAGGA GCCGUUAGGC UCCGGG GGUGAUUU | 4800 |
| 2628 | ACCGACCU G AAGGCGGA | 1340 | UCCGCCUU GGA GCCGUUAGGC UCCCUUCAAGGA GCCGUUAGGC UCCGGG AGGUCGGU | 4801 |
| 2664 | AUUAAUCU G ACUUGGAC | 1341 | GUCCAAGU GGA GCCGUUAGGC UCCCUUCAAGGA GCCGUUAGGC UCCGGG AGAUUAAU | 4802 |
| 2686 | CUGGGGAU G AUUAUGAC | 1342 | GUCAUAAU GGA GCCGUUAGGC UCCCUUCAAGGA GCCGUUAGGC UCCGGG AUCCCCAG | 4803 |
| 2692 | AUGAUUAU G ACCAUGGA | 1343 | UCCAUGGU GGA GCCGUUAGGC UCCCUUCAAGGA GCCGUUAGGC UCCGGG AUAAUCAU | 4804 |
| 2723 | UAUCAUUC G AAUAAGUA | 1344 | UACUUAUU GGA GCCGUUAGGC UCCCUUCAAGGA GCCGUUAGGC UCCGGG GAAUGAUA | 4805 |
| 2743 | GUAUUCUU G AUCUCAGA | 1345 | UCUGAGAU GGA GCCGUUAGGC UCCCUUCAAGGA GCCGUUAGGC UCCGGG AAGAAUAC | 4806 |
| 2764 | AGUUCAAU G AAUCUCUU | 1346 | AAGAGAUU GGA GCCGUUAGGC UCCCUUCAAGGA GCCGUUAGGC UCCGGG AUUGAACU | 4807 |
| 2778 | CUUCAAGU G AAUACUAC | 1347 | GUAGUAUU GGA GCCGUUAGGC UCCCUUCAAGGA GCCGUUAGGC UCCGGG ACUUGAAG | 4808 |
| 2788 | AUACUACU G CUCUCAUC | 1348 | GAUGAGAG GGA GCCGUUAGGC UCCCUUCAAGGA GCCGUUAGGC UCCGGG AGUAGUAU | 4809 |
| 2815 | CCAACUCU G AGGAAGUC | 1349 | GACUUCCU GGA GCCGUUAGGC UCCCUUCAAGGA GCCGUUAGGC UCCGGG AGAGUUGG | 4810 |
| 2854 | UUACUUUU G AAAAUGGC | 1350 | GCCAUUUU GGA GCCGUUAGGC UCCCUUCAAGGA GCCGUUAGGC UCCGGG AAAAGUAA | 4811 |
| 2878 | UUUUCAUU G CUAUUCAG | 1351 | CUGAAUAG GGA GCCGUUAGGC UCCCUUCAAGGA GCCGUUAGGC UCCGGG AAUGAAAA | 4812 |
| 2893 | AGGCUGUU G AUAAGGUC | 1352 | GACCUUAU GGA GCCGUUAGGC UCCCUUCAAGGA GCCGUUAGGC UCCGGG AACAGCCU | 4813 |
| 2902 | AUAAGGUC G AUCUGAAA | 1353 | UUUCAGAU GGA GCCGUUAGGC UCCCUUCAAGGA GCCGUUAGGC UCCGGG GACCUUAU | 4814 |
| 2907 | GUCGAUCU G AAAUCAGA | 1354 | UCUGAUUU GGA GCCGUUAGGC UCCCUUCAAGGA GCCGUUAGGC UCCGGG AGAUCGAC | 4815 |
| 2929 | CCAACAUU G CACGAGUA | 1355 | UACUCGUG GGA GCCGUUAGGC UCCCUUCAAGGA GCCGUUAGGC UCCGGG AAUGUUGG | 4816 |
| 2933 | CAUUGCAC G AGUAUCUU | 1356 | AAGAUACU GGA GCCGUUAGGC UCCCUUCAAGGA GCCGUUAGGC UCCGGG GUGCAAUG | 4817 |
| 2964 | CAGACUCC G CCAGAGAC | 1357 | GUCUCUGG GGA GCCGUUAGGC UCCCUUCAAGGA GCCGUUAGGC UCCGGG GGAGUCUG | 4818 |
| 2983 | CUAGUCCU G AUGAAACG | 1358 | CGUUUCAU GGA GCCGUUAGGC UCCCUUCAAGGA GCCGUUAGGC UCCGGG AGGACUAG | 4819 |
| 2986 | GUCCUGAU G AAACGUCU | 1359 | AGACGUUU GGA GCCGUUAGGC UCCCUUCAAGGA GCCGUUAGGC UCCGGG AUCAGGAC | 4820 |
| 2995 | AAACGUCU G CUCCUUGU | 1360 | ACAAGGAG GGA GCCGUUAGGC UCCCUUCAAGGA GCCGUUAGGC UCCGGG AGACGUUU | 4821 |
| 3078 | GGAGAACU G CAGCUGUC | 1361 | GACAGCUG GGA GCCGUUAGGC UCCCUUCAAGGA GCCGUUAGGC UCCGGG AGUUCUCC | 4822 |
| 3101 | CUAGGGCU G AAUUUUUG | 1362 | CAAAAAUU GGA GCCGUUAGGC UCCCUUCAAGGA GCCGUUAGGC UCCGGG AGCCCUAG | 4823 |
| 3145 | CUUUUUUU G AUUAUAAA | 1363 | UUUAUAAU GGA GCCGUUAGGC UCCCUUCAAGGA GCCGUUAGGC UCCGGG AAAAAAAG | 4824 |
| 3191 | UAGGGGGC G AUAUACUA | 1364 | UAGUAUAU GGA GCCGUUAGGC UCCCUUCAAGGA GCCGUUAGGC UCCGGG GCCCCCUA | 4825 |
| 3244 | UAGGGGGC G AUAUACUA | 1364 | UAGUAUAU GGA GCCGUUAGGC UCCCUUCAAGGA GCCGUUAGGC UCCGGG GCCCCCUA | 4825 |
| 3281 | UAGGGGGC G AUAAAAUA | 1365 | UAUUUUAU GGA GCCGUUAGGC UCCCUUCAAGGA GCCGUUAGGC UCCGGG GCCCCCUA | 4826 |
| 3294 | AAUAAAAU G CUAAACAA | 1366 | UUGUUUAG GGA GCCGUUAGGC UCCCUUCAAGGA GCCGUUAGGC UCCGGG AUUUUAUU | 4827 |
| 27 | AAAUGGAU G UGGAAUAU | 1367 | AUAUUCCA GGA GCCGUUAGGC UCCCUUCAAGGA GCCGUUAGGC UCCGGG AUCCAUUU | 4828 |
| 52 | AUUUUCUU G UUUAAGGG | 1368 | CCCUUAAA GGA GCCGUUAGGC UCCCUUCAAGGA GCCGUUAGGC UCCGGG AAGAAAAU | 4829 |
| 75 | GAAGAGGU G UUGAGGUU | 1369 | AACCUCAA GGA GCCGUUAGGC UCCCUUCAAGGA GCCGUUAGGC UCCGGG ACCUCUUC | 4830 |
| 86 | GAGGUUAU G UCAAGCAU | 1370 | AUGCUUGA GGA GCCGUUAGGC UCCCUUCAAGGA GCCGUUAGGC UCCGGG AUAACCUC | 4831 |
| 155 | AAGAUAUU G UUAUCAUU | 1371 | AAUGAUAA GGA GCCGUUAGGC UCCCUUCAAGGA GCCGUUAGGC UCCGGG AAUAUCUU | 4832 |
| 221 | AAAGACCU G UGAUAAAC | 1372 | GUUUAUCA GGA GCCGUUAGGC UCCCUUCAAGGA GCCGUUAGGC UCCGGG AGGUCUUU | 4833 |
| 253 | GGAAACGU G UGUCUAUA | 1373 | UAUAGACA GGA GCCGUUAGGC UCCCUUCAAGGA GCCGUUAGGC UCCGGG ACGUUUCC | 4834 |
| 255 | AAACGUGU G UCUAUAUU | 1374 | AAUAUAGA GGA GCCGUUAGGC UCCCUUCAAGGA GCCGUUAGGC UCCGGG ACACGUUU | 4835 |
| 273 | UCAUAUCU G UAUAUAUA | 1375 | UAUAUAUA GGA GCCGUUAGGC UCCCUUCAAGGA GCCGUUAGGC UCCGGG AGAUAUGA | 4836 |
| 344 | AGGGAGAU G UACAGCAA | 1376 | UUGCUGUA GGA GCCGUUAGGC UCCCUUCAAGGA GCCGUUAGGC UCCGGG AUCUCCCU | 4837 |
| 373 | AGAGUUCU G UGUUCAUC | 1377 | GAUGAACA GGA GCCGUUAGGC UCCCUUCAAGGA GCCGUUAGGC UCCGGG AGAACUCU | 4838 |
| 375 | AGUUCUGU G UUCAUCUU | 1378 | AAGAUGAA GGA GCCGUUAGGC UCCCUUCAAGGA GCCGUUAGGC UCCGGG ACAGAACU | 4839 |
| 457 | AAGGCAUU G UCGUUGCA | 1379 | UGCAACGA GGA GCCGUUAGGC UCCCUUCAAGGA GCCGUUAGGC UCCGGG AAUGCCUU | 4840 |
| 478 | ACCCCAAU G UGCCAGAA | 1380 | UUCUGGCA GGA GCCGUUAGGC UCCCUUCAAGGA GCCGUUAGGC UCCGGG AUUGGGGU | 4841 |
| 537 | GCAUCUCU G UAUCUGUU | 1381 | AACAGAUA GGA GCCGUUAGGC UCCCUUCAAGGA GCCGUUAGGC UCCGGG AGAGAUGC | 4842 |
| 543 | CUGUAUCU G UUUGAAGC | 1382 | GCUUCAAA GGA GCCGUUAGGC UCCCUUCAAGGA GCCGUUAGGC UCCGGG AGAUACAG | 4843 |
| 580 | UCAAAAAU G UUGCCAUU | 1383 | AAUGGCAA GGA GCCGUUAGGC UCCCUUCAAGGA GCCGUUAGGC UCCGGG AUUUUUGA | 4844 |
| 625 | CUGACUAU G UGAGACCA | 1384 | UGGUCUCA GGA GCCGUUAGGC UCCCUUCAAGGA GCCGUUAGGC UCCGGG AUAGUCAG | 4845 |
| 661 | AUGCUGAU G UUCUGGUU | 1385 | AACCAGAA GGA GCCGUUAGGC UCCCUUCAAGGA GCCGUUAGGC UCCGGG AUCAGCAU | 4846 |
| 725 | GGGCAACU G UGGAGAGA | 1386 | UCUCUCCA GGA GCCGUUAGGC UCCCUUCAAGGA GCCGUUAGGC UCCGGG AGUUGCCC | 4847 |
| 814 | AGGCAUUU G UCCAUGAG | 1387 | CUCAUGGA GGA GCCGUUAGGC UCCCUUCAAGGA GCCGUUAGGC UCCGGG AAAUGCCU | 4848 |
| 911 | AGUAAGAU G UUCAGCAG | 1388 | CUGCUGAA GGA GCCGUUAGGC UCCCUUCAAGGA GCCGUUAGGC UCCGGG AUCUUACU | 4849 |
| 937 | GUACAAAU G UAGUAAAG | 1389 | CUUUACUA GGA GCCGUUAGGC UCCCUUCAAGGA GCCGUUAGGC UCCGGG AUUUGUAC | 4850 |
| 950 | AAAGAAGU G UCAGGGAG | 1390 | CUCCCUGA GGA GCCGUUAGGC UCCCUUCAAGGA GCCGUUAGGC UCCGGG ACUUCUUU | 4851 |
| 965 | AGGCAGCU G UUACACCA | 1391 | UGGUGUAA GGA GCCGUUAGGC UCCCUUCAAGGA GCCGUUAGGC UCCGGG AGCUGCCU | 4852 |
| 1019 | AAAAGGAU G UGAGUUUG | 1392 | CAAACUCA GGA GCCGUUAGGC UCCCUUCAAGGA GCCGUUAGGC UCCGGG AUCCUUUU | 4853 |
| 1027 | GUGAGUUU G UUCUCCAA | 1393 | UUGGAGAA GGA GCCGUUAGGC UCCCUUCAAGGA GCCGUUAGGC UCCGGG AAACUCAC | 4854 |
| 1065 | UCUAUAAU G UUUGCACA | 1394 | UGUGCAAA GGA GCCGUUAGGC UCCCUUCAAGGA GCCGUUAGGC UCCGGG AUUAUAGA | 4855 |
| 1078 | CACAACAU G UUGAUUCU | 1395 | AGAAUCAA GGA GCCGUUAGGC UCCCUUCAAGGA GCCGUUAGGC UCCGGG AUGUUGUG | 4856 |
| 1100 | UGAAUUCU G UACAGAAC | 1396 | GUUCUGUA GGA GCCGUUAGGC UCCCUUCAAGGA GCCGUUAGGC UCCGGG AGAAUUCA | 4857 |
| 1270 | AAAGAAUU G UGUGUUUA | 1397 | UAAACACA GGA GCCGUUAGGC UCCCUUCAAGGA GCCGUUAGGC UCCGGG AAUUCUUU | 4858 |
| 1272 | AGAAUUGU G UGUUUAGU | 1398 | ACUAAACA GGA GCCGUUAGGC UCCCUUCAAGGA GCCGUUAGGC UCCGGG ACAAUUCU | 4859 |
| 1274 | AAUUGUGU G UUUAGUCC | 1399 | GGACUAAA GGA GCCGUUAGGC UCCCUUCAAGGA GCCGUUAGGC UCCGGG ACACAAUU | 4860 |
| 1414 | CUGCCCAU G UACAAAGU | 1400 | ACUUUGUA GGA GCCGUUAGGC UCCCUUCAAGGA GCCGUUAGGC UCCGGG AUGGGCAG | 4861 |
| 1534 | CAUUUACU G UGAUUAGG | 1401 | CCUAAUCA GGA GCCGUUAGGC UCCCUUCAAGGA GCCGUUAGGC UCCGGG AGUAAAUG | 4862 |
| 1573 | CUGAAAUU G UGCUGCUG | 1402 | CAGCAGCA GGA GCCGUUAGGC UCCCUUCAAGGA GCCGUUAGGC UCCGGG AAUUUCAG | 4863 |
| 1695 | GAGGAGCU G UCCAAAAU | 1403 | AUUUUGGA GGA GCCGUUAGGC UCCCUUCAAGGA GCCGUUAGGC UCCGGG AGCUCCUC | 4864 |
| 1795 | AUGGAGCU G UCUCUCAG | 1404 | CUGAGAGA GGA GCCGUUAGGC UCCCUUCAAGGA GCCGUUAGGC UCCGGG AGCUCCAU | 4865 |
| 1902 | GACACUUU G UUUCUUAU | 1405 | AUAAGAAA GGA GCCGUUAGGC UCCCUUCAAGGA GCCGUUAGGC UCCGGG AAAGUGUC | 4866 |
| 1978 | GUGGCUUU G UAGUGGAC | 1406 | GUCCACUA GGA GCCGUUAGGC UCCCUUCAAGGA GCCGUUAGGC UCCGGG AAAGCCAC | 4867 |
| 2086 | CCCUGACU G UCACGUCC | 1407 | GGACGUGA GGA GCCGUUAGGC UCCCUUCAAGGA GCCGUUAGGC UCCGGG AGUCAGGG | 4868 |
| 2227 | GGGCCAGU G UCACAGCC | 1408 | GGCUGUGA GGA GCCGUUAGGC UCCCUUCAAGGA GCCGUUAGGC UCCGGG ACUGGCCC | 4869 |
| 2320 | AUGACGGU G UCUACUCA | 1409 | UGAGUAGA GGA GCCGUUAGGC UCCCUUCAAGGA GCCGUUAGGC UCCGGG ACCGUCAU | 4870 |
| 2368 | GAUACAGU G UAAAAGUG | 1410 | CACUUUUA GGA GCCGUUAGGC UCCCUUCAAGGA GCCGUUAGGC UCCGGG ACUGUAUC | 4871 |
| 2439 | GGAGCACU G UACAUACC | 1411 | GGUAUGUA GGA GCCGUUAGGC UCCCUUCAAGGA GCCGUUAGGC UCCGGG AGUGCUCC | 4872 |
| 2512 | AGGAUGAU G UUCAACAC | 1412 | GUGUUGAA GGA GCCGUUAGGC UCCCUUCAAGGA GCCGUUAGGC UCCGGG AUCAUCCU | 4873 |
| 2529 | AAGCAAGU G UGUUUCAG | 1413 | CUGAAACA GGA GCCGUUAGGC UCCCUUCAAGGA GCCGUUAGGC UCCGGG ACUUGCUU | 4874 |
| 2531 | GCAAGUGU G UUUCAGCA | 1414 | UGCUGAAA GGA GCCGUUAGGC UCCCUUCAAGGA GCCGUUAGGC UCCGGG ACACUUGC | 4875 |
| 2563 | GCUCAUUU G UGGCUUCU | 1415 | AGAAGCCA GGA GCCGUUAGGC UCCCUUCAAGGA GCCGUUAGGC UCCGGG AAAUGAGC | 4876 |
| 2575 | CUUCUGAU G UCCCAAAU | 1416 | AUUUGGGA GGA GCCGUUAGGC UCCCUUCAAGGA GCCGUUAGGC UCCGGG AUCAGAAG | 4877 |
| 2829 | GUCUUUUU G UUUAAACC | 1417 | GGUUUAAA GGA GCCGUUAGGC UCCCUUCAAGGA GCCGUUAGGC UCCGGG AAAAAGAC | 4878 |
| 2890 | UUCAGGCU G UUGAUAAG | 1418 | CUUAUCAA GGA GCCGUUAGGC UCCCUUCAAGGA GCCGUUAGGC UCCGGG AGCCUGAA | 4879 |
| 2943 | GUAUCUUU G UUUAUUCC | 1419 | GGAAUAAA GGA GCCGUUAGGC UCCCUUCAAGGA GCCGUUAGGC UCCGGG AAAGAUAC | 4880 |
| 3002 | UGCUCCUU G UCCUAAUA | 1420 | UAUUAGGA GGA GCCGUUAGGC UCCCUUCAAGGA GCCGUUAGGC UCCGGG AAGGAGCA | 4881 |
| 3057 | AAAAUUAU G UGGAAGUG | 1421 | CACUUCCA GGA GCCGUUAGGC UCCCUUCAAGGA GCCGUUAGGC UCCGGG AUAAUUUU | 4882 |
| 3084 | CUGCAGCU G UCAAUAGC | 1422 | GCUAUUGA GGA GCCGUUAGGC UCCCUUCAAGGA GCCGUUAGGC UCCGGG AGCUGCAG | 4883 |
| 3109 | GAAUUUUU G UCAGAUAA | 1423 | UUAUCUGA GGA GCCGUUAGGC UCCCUUCAAGGA GCCGUUAGGC UCCGGG AAAAAUUC | 4884 |
| 3166 | UCUAAAAU G UAUUUUAG | 1424 | CUAAAAUA GGA GCCGUUAGGC UCCCUUCAAGGA GCCGUUAGGC UCCGGG AUUUUAGA | 4885 |
| 3182 | GACUUCCU G UAGGGGGC | 1425 | GCCCCCUA GGA GCCGUUAGGC UCCCUUCAAGGA GCCGUUAGGC UCCGGG AGGAAGUC | 4886 |
| 3272 | GACUUCCU G UAGGGGGC | 1425 | GCCCCCUA GGA GCCGUUAGGC UCCCUUCAAGGA GCCGUUAGGC UCCGGG AGGAAGUC | 4886 |
| 3203 | UACUAAAU G UAUAUAGU | 1426 | ACUAUAUA GGA GCCGUUAGGC UCCCUUCAAGGA GCCGUUAGGC UCCGGG AUUUAGUA | 4887 |
| 3227 | UACUAAAU G UAUUCCUG | 1427 | CAGGAAUA GGA GCCGUUAGGC UCCCUUCAAGGA GCCGUUAGGC UCCGGG AUUUAGUA | 4888 |
| 3235 | GUAUUCCU G UAGGGGGC | 1428 | GCCCCCUA GGA GCCGUUAGGC UCCCUUCAAGGA GCCGUUAGGC UCCGGG AGGAAUAC | 4889 |
| 3256 | UACUAAAU G UAUUUUAG | 1429 | CUAAAAUA GGA GCCGUUAGGC UCCCUUCAAGGA GCCGUUAGGC UCCGGG AUUUAGUA | 4890 |
| 15 | UGCUUUUG G UACAAAUG | 1430 | CAUUUGUA GGA GCCGUUAGGC UCCCUUCAAGGA GCCGUUAGGC UCCGGG CAAAAGCA | 4891 |
| 63 | UAAGGGGA G CAUGAAGA | 1431 | UCUUCAUG GGA GCCGUUAGGC UCCCUUCAAGGA GCCGUUAGGC UCCGGG UCCCCUUA | 4892 |
| 73 | AUGAAGAG G UGUUGAGG | 1432 | CCUCAACA GGA GCCGUUAGGC UCCCUUCAAGGA GCCGUUAGGC UCCGGG CUCUUCAU | 4893 |
| 81 | GUGUUGAG G UUAUGUCA | 1433 | UGACAUAA GGA GCCGUUAGGC UCCCUUCAAGGA GCCGUUAGGC UCCGGG CUCAACAC | 4894 |
| 91 | UAUGUCAA G CAUCUGGC | 1434 | GCCAGAUG GGA GCCGUUAGGC UCCCUUCAAGGA GCCGUUAGGC UCCGGG UUGACAUA | 4895 |
| 98 | AGCAUCUG G CACAGCUG | 1435 | CAGCUGUG GGA GCCGUUAGGC UCCCUUCAAGGA GCCGUUAGGC UCCGGG CAGAUGCU | 4896 |
| 103 | CUGGCACA G CUGAAGGC | 1436 | GCCUUCAG GGA GCCGUUAGGC UCCCUUCAAGGA GCCGUUAGGC UCCGGG UGUGCCAG | 4897 |
| 110 | AGCUGAAG G CAGAUGGA | 1437 | UCCAUCUG GGA GCCGUUAGGC UCCCUUCAAGGA GCCGUUAGGC UCCGGG CUUCAGCU | 4898 |
| 130 | AUUUACAA G UACGCAAU | 1438 | AUUGCGUA GGA GCCGUUAGGC UCCCUUCAAGGA GCCGUUAGGC UCCGGG UUGUAAAU | 4899 |
| 182 | AGACAAGA G CAAUAGUA | 1439 | UACUAUUG GGA GCCGUUAGGC UCCCUUCAAGGA GCCGUUAGGC UCCGGG UCUUGUCU | 4900 |
| 188 | GAGCAAUA G UAAAACAC | 1440 | GUGUUUUA GGA GCCGUUAGGC UCCCUUCAAGGA GCCGUUAGGC UCCGGG UAUUGCUC | 4901 |
| 202 | CACAUCAG G UCAGGGGG | 1441 | CCCCCUGA GGA GCCGUUAGGC UCCCUUCAAGGA GCCGUUAGGC UCCGGG CUGAUGUG | 4902 |
| 210 | GUCAGGGG G UUAAAGAC | 1442 | GUCUUUAA GGA GCCGUUAGGC UCCCUUCAAGGA GCCGUUAGGC UCCGGG CCCCUGAC | 4903 |
| 242 | UCCGAUAA G UUGGAAAC | 1443 | GUUUCCAA GGA GCCGUUAGGC UCCCUUCAAGGA GCCGUUAGGC UCCGGG UUAUCGGA | 4904 |
| 251 | UUGGAAAC G UGUGUCUA | 1444 | UAGACACA GGA GCCGUUAGGC UCCCUUCAAGGA GCCGUUAGGC UCCGGG GUUUCCAA | 4905 |
| 287 | AUAUAAUG G UAAAGAAA | 1445 | UUUCUUUA GGA GCCGUUAGGC UCCCUUCAAGGA GCCGUUAGGC UCCGGG CAUUAUAU | 4906 |
| 305 | ACACCUUC G UAACCCGC | 1446 | GCGGGUUA GGA GCCGUUAGGC UCCCUUCAAGGA GCCGUUAGGC UCCGGG GAAGGUGU | 4907 |
| 349 | GAUGUACA G CAAUGGGG | 1447 | CCCCAUUG GGA GCCGUUAGGC UCCCUUCAAGGA GCCGUUAGGC UCCGGG UGUACAUC | 4908 |
| 357 | GCAAUGGG G CCAUUUAA | 1448 | UUAAAUGG GGA GCCGUUAGGC UCCCUUCAAGGA GCCGUUAGGC UCCGGG CCCAUUGC | 4909 |
| 368 | AUUUAAGA G UUCUGUGU | 1449 | ACACAGAA GGA GCCGUUAGGC UCCCUUCAAGGA GCCGUUAGGC UCCGGG UCUUAAAU | 4910 |
| 406 | UAGAAGGG G CCCUGAGU | 1450 | ACUCAGGG GGA GCCGUUAGGC UCCCUUCAAGGA GCCGUUAGGC UCCGGG CCCUUCUA | 4911 |
| 413 | GGCCCUGA G UAAUUCAC | 1451 | GUGAAUUA GGA GCCGUUAGGC UCCCUUCAAGGA GCCGUUAGGC UCCGGG UCAGGGCC | 4912 |
| 429 | CUCAUUCA G CUGAACAA | 1452 | UUGUUCAG GGA GCCGUUAGGC UCCCUUCAAGGA GCCGUUAGGC UCCGGG UGAAUGAG | 4913 |
| 443 | CAACAAUG G CUAUGAAG | 1453 | CUUCAUAG GGA GCCGUUAGGC UCCCUUCAAGGA GCCGUUAGGC UCCGGG CAUUGUUG | 4914 |
| 452 | CUAUGAAG G CAUUGUCG | 1454 | CGACAAUG GGA GCCGUUAGGC UCCCUUCAAGGA GCCGUUAGGC UCCGGG CUUCAUAG | 4915 |
| 460 | GCAUUGUC G UUGCAAUC | 1455 | GAUUGCAA GGA GCCGUUAGGC UCCCUUCAAGGA GCCGUUAGGC UCCGGG GACAAUGC | 4916 |
| 520 | AGGACAUG G UGACCCAG | 1456 | CUGGGUCA GGA GCCGUUAGGC UCCCUUCAAGGA GCCGUUAGGC UCCGGG CAUGUCCU | 4917 |
| 529 | UGACCCAG G CAUCUCUG | 1457 | CAGAGAUG GGA GCCGUUAGGC UCCCUUCAAGGA GCCGUUAGGC UCCGGG CUGGGUCA | 4918 |
| 550 | UGUUUGAA G CUACAGGA | 1458 | UCCUGUAG GGA GCCGUUAGGC UCCCUUCAAGGA GCCGUUAGGC UCCGGG UUCAAACA | 4919 |
| 561 | ACAGGAAA G CGAUUUUA | 1459 | UAAAAUCG GGA GCCGUUAGGC UCCCUUCAAGGA GCCGUUAGGC UCCGGG UUUCCUGU | 4920 |
| 616 | AGACAAAG G CUGACUAU | 1460 | AUAGUCAG GGA GCCGUUAGGC UCCCUUCAAGGA GCCGUUAGGC UCCGGG CUUUGUCU | 4921 |
| 667 | AUGUUCUG G UUGCUGAG | 1461 | CUCAGCAA GGA GCCGUUAGGC UCCCUUCAAGGA GCCGUUAGGC UCCGGG CAGAACAU | 4922 |
| 675 | GUUGCUGA G UCUACUCC | 1462 | GGACUAGA GGA GCCGUUAGGC UCCCUUCAAGGA GCCGUUAGCC UCCGGG UCAGCAAC | 4923 |
| 689 | UCCUCCAG G UAAUGAUG | 1463 | CAUCAUUA GGA GCCGUUAGGC UCCCUUCAAGGA GCCGUUAGGC UCCGGG CUGGAGGA | 4924 |
| 711 | UACACUGA G CAGAUGGG | 1464 | CCCAUCUG GGA GCCGUUAGGC UCCCUUCAAGGA GCCGUUAGGC UCCGGG UCAGUGUA | 4925 |
| 719 | GCAGAUGG G CAACUGUG | 1465 | CACAGUUG GGA GCCGUUAGGC UCCCUUCAAGGA GCCGUUAGGC UCCGGG CCAUCUGC | 4926 |
| 737 | AGAGAAGG G UGAAAGGA | 1466 | UCCUUUCA GGA GCCGUUAGGC UCCCUUCAAGGA GCCGUUAGGC UCCGGG CCUUCUCU | 4927 |
| 780 | GGAAAAAA G UUAGCUGA | 1467 | UCAGCUAA GGA GCCGUUAGGC UCCCUUCAAGGA GCCGUUAGGC UCCGGG UUUUUUCC | 4928 |
| 784 | AAAAGUUA G CUGAAUAU | 1468 | AUAUUCAG GGA GCCGUUAGGC UCCCUUCAAGGA GCCGUUAGGC UCCGGG UAACUUUU | 4929 |
| 803 | ACCACAAG G UAAGGCAU | 1469 | AUGCCUUA GGA GCCGUUAGGC UCCCUUCAAGGA GCCGUUAGGC UCCGGG CUUGUGGU | 4930 |
| 808 | AAGGUAAG G CAUUUGUC | 1470 | GACAAAUG GGA GCCGUUAGGC UCCCUUCAAGGA GCCGUUAGGC UCCGGG CUUACCUU | 4931 |
| 822 | GUCCAUGA G UGGGCUCA | 1471 | UGAGCCCA GGA GCCGUUAGGC UCCCUUCAAGGA GCCGUUAGGC UCCGGG UCAUGGAC | 4932 |
| 826 | AUGAGUGG G CUCAUCUA | 1472 | UAGAUGAG GGA GCCGUUAGGC UCCCUUCAAGGA GCCGUUAGGC UCCGGG CCACUCAU | 4933 |
| 844 | GAUGGGGA G UAUUUGAC | 1473 | GUCAAAUA GGA GCCGUUAGGC UCCCUUCAAGGA GCCGUUAGGC UCCGGG UCCCCAUC | 4934 |
| 855 | UUUGACGA G UACAAUAA | 1474 | UUAUUGUA GGA GCCGUUAGGC UCCCUUCAAGGA GCCGUUAGGC UCCGGG UCGUCAAA | 4935 |
| 901 | GAAUACAA G CAGUAAGA | 1475 | UCUUACUG GGA GCCGUUAGGC UCCCUUCAAGGA GCCGUUAGGC UCCGGG UUGUAUUC | 4936 |
| 904 | UACAAGCA G UAAGAUGU | 1476 | ACAUCUUA GGA GCCGUUAGGC UCCCUUCAAGGA GCCGUUAGGC UCCGGG UGCUUGUA | 4937 |
| 916 | GAUGUUCA G CAGGUAUU | 1477 | AAUACCUG GGA GCCGUUAGGC UCCCUUCAAGGA GCCGUUAGGC UCCGGG UGAACAUC | 4938 |
| 920 | UUCAGCAG G UAUUACUG | 1478 | CAGUAAUA GGA GCCGUUAGGC UCCCUUCAAGGA GCCGUUAGGC UCCGGG CUGCUGAA | 4939 |
| 929 | UAUUACUG G UACAAAUG | 1479 | CAUUUGUA GGA GCCGUUAGGC UCCCUUCAAGGA GCCGUUAGGC UCCGGG CAGUAAUA | 4940 |
| 940 | CAAAUGUA G UAAAGAAG | 1480 | CUUCUUUA GGA GCCGUUAGGC UCCCUUCAAGGA GCCGUUAGGC UCCGGG UACAUUUG | 4941 |
| 948 | GUAAAGAA G UGUCAGGG | 1481 | CCCUGACA GGA GCCGUUAGGC UCCCUUCAAGGA GCCGUUAGGC UCCGGG UUCUUUAC | 4942 |
| 959 | UCAGGCAC G CAGCUGUU | 1482 | AACAGCUG GGA GCCGUUAGGC UCCCUUCAAGGA GCCGUUAGGC UCCGGG CUCCCUGA | 4943 |
| 962 | GGGAGCCA G CUGUUACA | 1483 | UGUAACAG GGA GCCGUUAGGC UCCCUUCAAGGA GCCGUUAGGC UCCGGG UGCCUCCC | 4944 |
| 994 | UCAAUAAA G UUACAGGA | 1484 | UCCUGUAA GGA GCCGUUAGGC UCCCUUCAAGGA GCCGUUAGGC UCCGGG UUUAUUGA | 4945 |
| 1023 | GGAUGUGA G UUUGUUCU | 1485 | AGAACAAA GGA GCCGUUAGGC UCCCUUCAAGGA GCCGUUAGGC UCCGGG UCACAUCC | 4946 |
| 1054 | CGGAGAAG G CUUCUAUA | 1486 | UAUAGAAG GGA GCCGUUAGGC UCCCUUCAAGGA GCCGUUAGGC UCCGGG CUUCUCCG | 4947 |
| 1090 | AUUCUAUA G UUGAAUUC | 1487 | GAAUUCAA GGA GCCGUUAGGC UCCCUUCAAGGA GCCGUUAGGC UCCGGG UAUAGAAU | 4948 |
| 1126 | ACAAAGAA G CUCCAAAC | 1488 | GUUUGGAG GGA GCCGUUAGGC UCCCUUCAAGGA GCCGUUAGGC UCCGGG UUCUUUGU | 4949 |
| 1137 | CCAAACAA G CAAAAUCA | 1489 | UGAUUUUG GGA GCCGUUAGGC UCCCUUCAAGGA GCCGUUAGGC UCCGGG UUGUUUGG | 4950 |
| 1163 | UCUCCGAA G CACAUGGG | 1490 | CCCAUGUG GGA GCCGUUAGGC UCCCUUCAAGGA GCCGUUAGGC UCCGGG UUCGGAGA | 4951 |
| 1174 | CAUGGGAA G UGAUCCGU | 1491 | ACGGAUCA GGA GCCGUUAGGC UCCCUUCAAGGA GCCGUUAGGC UCCGGG UUCCCAUG | 4952 |
| 1181 | AGUGAUCC G UGAUUCUG | 1492 | CAGAAUCA GGA GCCGUUAGGC UCCCUUCAAGGA GCCGUUAGGC UCCGGG GGAUCACU | 4953 |
| 1224 | ACAACACA G CCACCAAA | 1493 | UUUGGUGG GGA GCCGUUAGGC UCCCUUCAAGGA GCCGUUAGGC UCCGGG UGUGUUGU | 4954 |
| 1279 | UGUGUUUA G UCCUUGAC | 1494 | GUCAAGGA GGA GCCGUUAGGC UCCCUUCAAGGA GCCGUUAGGC UCCGGG UAAACACA | 4955 |
| 1298 | AUCUGGAA G CAUGGCGA | 1495 | UCGCCAUG GGA GCCGUUAGGC UCCCUUCAAGGA GCCGUUAGGC UCCGGG UUCCAGAU | 4956 |
| 1303 | GAAGCAUG G CGACUGGU | 1496 | ACCAGUCG GGA GCCGUUAGGC UCCCUUCAAGGA GCCGUUAGGC UCCGGG CAUGCUUC | 4957 |
| 1310 | GGCGACUG G UAACCGCC | 1497 | GGCGGUUA GGA GCCGUUAGGC UCCCUUCAAGGA GCCGUUAGGC UCCGGG CAGUCGCC | 4958 |
| 1336 | UGAAUCAA G CAGGCCAG | 1498 | CUGGCCUG GGA GCCGUUAGGC UCCCUUCAAGGA GCCGUUAGGC UCCGGG UUGAUUCA | 4959 |
| 1340 | UCAAGCAG G CCAGCUUU | 1499 | AAAGCUGG GGA GCCGUUAGGC UCCCUUCAAGGA GCCGUUAGGC UCCGGG CUGCUUGA | 4960 |
| 1344 | GCAGGCCA G CUUUUCCU | 1500 | AGGAAAAG GGA GCCGUUAGGC UCCCUUCAAGGA GCCGUUAGGC UCCGGG UGGCCUGC | 4961 |
| 1363 | UGCAGACA G UUGAGCUG | 1501 | CAGCUCAA GGA GCCGUUAGGC UCCCUUCAAGGA GCCGUUAGGC UCCGGG UGUCUGCA | 4962 |
| 1368 | ACAGUUGA G CUGGGGUC | 1502 | GACCCCAG GGA GCCGUUAGGC UCCCUUCAAGGA GCCGUUAGGC UCCGGG UCAACUGU | 4963 |
| 1374 | GAGCUGGG G UCCUGGGU | 1503 | ACCCAGGA GGA GCCGUUAGGC UCCCUUCAAGGA GCCGUUAGGC UCCGGG CCCAGCUC | 4964 |
| 1381 | GGUCCUGG G UUGGGAUG | 1504 | CAUCCCAA GGA GCCGUUAGGC UCCCUUCAAGGA GCCGUUAGGC UCCGGG CCAGGACC | 4965 |
| 1390 | UUGGGAUG G UGACAUUU | 1505 | AAAUGUCA GGA GCCGUUAGGC UCCCUUCAAGGA GCCGUUAGGC UCCGGG CAUCCCAA | 4966 |
| 1403 | AUUUGACA G UGCUGCCC | 1506 | GGGCAGCA GGA GCCGUUAGGC UCCCUUCAAGGA GCCGUUAGGC UCCGGG UGUCAAAU | 4967 |
| 1421 | UGUACAAA G UGAACUCA | 1507 | UGAGUUCA GGA GCCGUUAGGC UCCCUUCAAGGA GCCGUUAGGC UCCGGG UUUGUACA | 4968 |
| 1442 | GAUAAACA G UGGCAGUG | 1508 | CACUGCCA GGA GCCGUUAGGC UCCCUUCAAGGA GCCGUUAGGC UCCGGG UGUUUAUC | 4969 |
| 1445 | AAACAGUG G CAGUGACA | 1509 | UGUCACUG GGA GCCGUUAGGC UCCCUUCAAGGA GCCGUUAGGC UCCGGG CACUGUUU | 4970 |
| 1448 | CAGUGGCA G UGACAGGG | 1510 | CCCUGUCA GGA GCCGUUAGGC UCCCUUCAAGGA GCCGUUAGGC UCCGGG UGCCACUG | 4971 |
| 1483 | UACCUGCA G CAGCUUCA | 1511 | UGAAGCUG GGA GCCGUUAGGC UCCCUUCAAGGA GCCGUUAGGC UCCGGG UGCAGGUA | 4972 |
| 1486 | CUGCAGCA G CUUCAGGA | 1512 | UCCUGAAG GGA GCCGUUAGGC UCCCUUCAAGGA GCCGUUAGGC UCCGGG UGCUGCAG | 4973 |
| 1500 | GGAGGGAC G UCCAUCUG | 1513 | CAGAUGGA GGA GCCGUUAGGC UCCCUUCAAGGA GCCGUUAGGC UCCGGG GUCCCUCC | 4974 |
| 1511 | CAUCUGCA G CGGGCUUC | 1514 | GAAGCCCG GGA GCCGUUAGGC UCCCUUCAAGGA GCCGUUAGGC UCCGGG UGCAGAUG | 4975 |
| 1515 | UGCAGCGG G CUUCGAUC | 1515 | GAUCGAAG GGA GCCGUUAGGC UCCCUUCAAGGA GCCGUUAGGC UCCGGG CCGCUGCA | 4976 |
| 1525 | UUCGAUCG G CAUUUACU | 1516 | AGUAAAUG GGA GCCGUUAGGC UCCCUUCAAGGA GCCGUUAGGC UCCGGG CGAUCGAA | 4977 |
| 1607 | CACUAUAA G UGGGUGCU | 1517 | AGCACCCA GGA GCCGUUAGGC UCCCUUCAAGGA GCCGUUAGGC UCCGGG UUAUAGUG | 4978 |
| 1611 | AUAAGUGG G UGCUUUAA | 1518 | UUAAAGCA GGA GCCGUUAGGC UCCCUUCAAGGA GCCGUUAGGC UCCGGG CCACUUAU | 4979 |
| 1624 | UUAACGAG G UCAAACAA | 1519 | UUGUUUGA GGA GCCGUUAGGC UCCCUUCAAGGA GCCGUUAGGC UCCGGG CUCGUUAA | 4980 |
| 1634 | CAAACAAA G UGGUGCCA | 1520 | UGGCACCA GGA GCCGUUAGGC UCCCUUCAAGGA GCCGUUAGGC UCCGGG UUUGUUUG | 4981 |
| 1637 | ACAAAGUG G UGCCAUCA | 1521 | UGAUGGCA GGA GCCGUUAGGC UCCCUUCAAGGA GCCGUUAGGC UCCGGG CACUUUGU | 4982 |
| 1654 | UCCACACA G UCGCUUUG | 1522 | CAAAGCGA GGA GCCGUUAGGC UCCCUUCAAGGA GCCGUUAGGC UCCGGG UGUGUGGA | 4983 |
| 1665 | GCUUUGGG G CCCUCUGC | 1523 | GCAGAGGG GGA GCCGUUAGGC UCCCUUCAAGGA GCCGUUAGGC UCCGGG CCCAAAGC | 4984 |
| 1675 | CCUCUGCA G CUCAAGAA | 1524 | UUCUUGAG GGA GCCGUUAGGC UCCCUUCAAGGA GCCGUUAGGC UCCGGG UGCAGAGG | 4985 |
| 1692 | CUAGAGGA G CUGUCCAA | 1525 | UUGGACAG GGA GCCGUUAGGC UCCCUUCAAGGA GCCGUUAGGC UCCGGG UCCUCUAG | 4986 |
| 1712 | GACAGGAG G UUUACAGA | 1526 | UCUGUAAA GGA GCCGUUAGGC UCCCUUCAAGGA GCCGUUAGGC UCCGGG CUCCUGUC | 4987 |
| 1738 | CAGAUCAA G UUCAGAAC | 1527 | GUUCUGAA GGA GCCGUUAGGC UCCCUUCAAGGA GCCGUUAGGC UCCGGG UUGAUCUG | 4988 |
| 1751 | GAACAAUG G CCUCAUUG | 1528 | CAAUGAGG GGA GCCGUUAGGC UCCCUUCAAGGA GCCGUUAGGC UCCGGG CAUUGUUC | 4989 |
| 1771 | CUUUUGGG G CCCUUUCA | 1529 | UGAAAGGG GGA GCCGUUAGGC UCCCUUCAAGGA GCCGUUAGGC UCCGGG CCCAAAAG | 4990 |
| 1792 | GAAAUGGA G CUGUCUCU | 1530 | AGAGACAG GGA GCCGUUAGGC UCCCUUCAAGGA GCCGUUAGGC UCCGGG UCCAUUUC | 4991 |
| 1803 | GUCUCUCA G CGCUCCAU | 1531 | AUGGAGCG GGA GCCGUUAGGC UCCCUUCAAGGA GCCGUUAGGC UCCGGG UGAGAGAC | 4992 |
| 1815 | UCCAUCCA G CUUGAGAG | 1532 | CUCUCAAG GGA GCCGUUAGGC UCCCUUCAAGGA GCCGUUAGGC UCCGGG UGGAUGGA | 4993 |
| 1823 | GCUUGAGA G UAAGGGAU | 1533 | AUCCCUUA GGA GCCGUUAGGC UCCCUUCAAGGA GCCGUUAGGC UCCGGG UCUCAAGC | 4994 |
| 1847 | CCAGAACA G CCAGUGGA | 1534 | UCCACUGG GGA GCCGUUAGGC UCCCUUCAAGGA GCCGUUAGGC UCCGGG UGUUCUGG | 4995 |
| 1851 | AACAGCCA G UGGAUGAA | 1535 | UUCAUCCA GGA GCCGUUAGGC UCCCUUCAAGGA GCCGUUAGGC UCCGGG UGGCUGUU | 4996 |
| 1862 | GAUGAAUG G CACAGUGA | 1536 | UCACUGUG GGA GCCGUUAGGC UCCCUUCAAGGA GCCGUUAGGC UCCGGG CAUUCAUC | 4997 |
| 1867 | AUGGCACA G UGAUCGUG | 1537 | CACGAUCA GGA GCCGUUAGGC UCCCUUCAAGGA GCCGUUAGGC UCCGGG UGUGCCAU | 4998 |
| 1873 | CAGUGAUC G UGGACAGC | 1538 | GCUGUCCA GGA GCCGUUAGGC UCCCUUCAAGGA GCCGUUAGGC UCCGGG GAUCACUG | 4999 |
| 1880 | CGUGGACA G CACCGUGG | 1539 | CCACGGUG GGA GCCGUUAGGC UCCCUUCAAGGA GCCGUUAGGC UCCGGG UGUCCACG | 5000 |
| 1885 | ACAGCACC G UGGGAAAG | 1540 | CUUUCCCA GGA GCCGUUAGGC UCCCUUCAAGGA GCCGUUAGGC UCCGGG GGUGCUGU | 5001 |
| 1926 | ACAACGCA G CCUCCCCA | 1541 | UGGGGAGG GGA GCCGUUAGGC UCCCUUCAAGGA GCCGUUAGGC UCCGGG UGCGUUGU | 5002 |
| 1955 | GGAUCCCA G UGGACAGA | 1542 | UCUGUCCA GGA GCCGUUAGGC UCCCUUCAAGGA GCCGUUAGGC UCCGGG UGGGAUCC | 5003 |
| 1965 | GGACAGAA G CAAGGUGG | 1543 | CCACCUUG GGA GCCGUUAGGC UCCCUUCAAGGA GCCGUUAGGC UCCGGG UUCUGUCC | 5004 |
| 1970 | GAAGCAAG G UGGCUUUG | 1544 | CAAAGCCA GGA GCCGUUAGGC UCCCUUCAAGGA GCCGUUAGGC UCCGGG CUUGCUUC | 5005 |
| 1973 | GCAAGGUG G CUUUGUAG | 1545 | CUACAAAG GGA GCCGUUAGGC UCCCUUCAAGGA GCCGUUAGGC UCCGGG CACCUUGC | 5006 |
| 1981 | GCUUUGUA G UGGACAAA | 1546 | UUUGUCCA GGA GCCGUUAGGC UCCCUUCAAGGA GCCGUUAGGC UCCGGG UACAAAGC | 5007 |
| 2002 | CCAAAAUG G CCUACCUC | 1547 | GAGGUAGG GGA GCCGUUAGGC UCCCUUCAAGGA GCCGUUAGGC UCCGGG CAUUUUGG | 5008 |
| 2021 | AAUCCCAG G CAUUGCUA | 1548 | UAGCAAUG GGA GCCGUUAGGC UCCCUUCAAGGA GCCGUUAGGC UCCGGG CUGGGAUU | 5009 |
| 2032 | UUGCUAAG G UUGGCACU | 1549 | AGUGCCAA GGA GCCGUUAGGC UCCCUUCAAGGA GCCGUUAGGC UCCGGG CUUAGCAA | 5010 |
| 2036 | UAAGGUUG G CACUUGGA | 1550 | UCCAAGUG GGA GCCGUUAGGC UCCCUUCAAGGA GCCGUUAGGC UCCGGG CAACCUUA | 5011 |
| 2051 | GAAAUACA G UCUGCAAG | 1551 | CUUGCAGA GGA GCCGUUAGGC UCCCUUCAAGGA GCCGUUAGGC UCCGGG UGUAUUUC | 5012 |
| 2059 | GUCUGCAA G CAAGCUCA | 1552 | UGAGCUUG GGA GCCGUUAGGC UCCCUUCAAGGA GCCGUUAGGC UCCGGG UUGCAGAC | 5013 |
| 2063 | GCAAGCAA G CUCACAAA | 1553 | UUUGUGAG GGA GCCGUUAGGC UCCCUUCAAGGA GCCGUUAGGC UCCGGG UUGCUUGC | 5014 |
| 2091 | ACUGUCAC G UCCCGUGC | 1554 | GCACGGGA GGA GCCGUUAGGC UCCCUUCAAGGA GCCGUUAGGC UCCGGG GUGACAGU | 5015 |
| 2096 | CACGUCCC G UGCGUCCA | 1555 | UGGACGCA GGA GCCGUUAGGC UCCCUUCAAGGA GCCGUUAGGC UCCGGG GGGACGUG | 5016 |
| 2100 | UCCCGUGC G UCCAAUGC | 1556 | GCAUUGGA GGA GCCGUUAGGC UCCCUUCAAGGA GCCGUUAGGC UCCGGG GCACGGGA | 5017 |
| 2128 | CAAUUACA G UGACUUCC | 1557 | GGAAGUCA GGA GCCGUUAGGC UCCCUUCAAGGA GCCGUUAGGC UCCGGG UGUAAUUG | 5018 |
| 2156 | GGACACCA G CAAAUUCC | 1558 | GGAAUUUG GGA GCCGUUAGGC UCCCUUCAAGGA GCCGUUAGGC UCCGGG UGGUGUCC | 5019 |
| 2168 | AUUCCCCA G CCCUCUGG | 1559 | CCAGAGGG GGA GCCGUUAGGC UCCCUUCAAGGA GCCGUUAGGC UCCGGG UGGGGAAU | 5020 |
| 2176 | GCCCUCUG G UAGUUUAU | 1560 | AUAAACUA GGA GCCGUUAGGC UCCCUUCAAGGA GCCGUUAGGC UCCGGG CAGAGGGC | 5021 |
| 2179 | CUCUGGUA G UUUAUGCA | 1561 | UGCAUAAA GGA GCCGUUAGGC UCCCUUCAAGGA GCCGUUAGGC UCCGGG UACCAGAG | 5022 |
| 2203 | GCCAAGGA G CCUCCCCA | 1562 | UGGGGAGG GGA GCCGUUAGGC UCCCUUCAAGGA GCCGUUAGGC UCCGGG UCCUUGGC | 5023 |
| 2221 | UUCUCAGG G CCAGUGUC | 1563 | GACACUGG GGA GCCGUUAGGC UCCCUUCAAGGA GCCGUUAGGC UCCGGG CCUGAGAA | 5024 |
| 2225 | CAGGGCCA G UGUCACAG | 1564 | CUGUGACA GGA GCCGUUAGGC UCCCUUCAAGGA GCCGUUAGGC UCCGGG UGGCCCUG | 5025 |
| 2233 | GUGUCACA G CCCUGAUU | 1565 | AAUCAGGG GGA GCCGUUAGGC UCCCUUCAAGGA GCCGUUAGGC UCCGGG UGUGACAC | 5026 |
| 2248 | UUGAAUCA G UGAAUGGA | 1566 | UCCAUUCA GGA GCCGUUAGGC UCCCUUCAAGGA GCCGUUAGGC UCCGGG UGAUUCAA | 5027 |
| 2263 | GAAAAACA G UUACCUUG | 1567 | CAAGGUAA GGA GCCGUUAGGC UCCCUUCAAGGA GCCGUUAGGC UCCGGG UGUUUUUC | 5028 |
| 2290 | AUAAUGGA G CAGGUGCU | 1568 | AGCACCUG GGA GCCGUUAGGC UCCCUUCAAGGA GCCGUUAGGC UCCGGG UCCAUUAU | 5029 |
| 2294 | UGGAGCAG G UGCUGAUG | 1569 | CAUCAGCA GGA GCCGUUAGGC UCCCUUCAAGGA GCCGUUAGGC UCCGGG CUGCUCCA | 5030 |
| 2318 | GGAUGACG G UGUCUACU | 1570 | AGUAGACA GGA GCCGUUAGGC UCCCUUCAAGGA GCCGUUAGGC UCCGGG CGUCAUCC | 5031 |
| 2331 | UACUCAAG G UAUUUCAC | 1571 | GUGAAAUA GGA GCCGUUAGGC UCCCUUCAAGGA GCCGUUAGGC UCCGGG CUUGAGUA | 5032 |
| 2357 | CACGAAUG G UAGAUACA | 1572 | UGUAUCUA GGA GCCGUUAGGC UCCCUUCAAGGA GCCGUUAGGC UCCGGG CAUUCGUG | 5033 |
| 2366 | UAGAUACA G UGUAAAAG | 1573 | CUUUUACA GGA GCCGUUAGGC UCCCUUCAAGGA GCCGUUAGGC UCCGGG UGUAUCUA | 5034 |
| 2374 | GUGUAAAA G UGCGGGCU | 1574 | AGCCCGCA GGA GCCGUUAGGC UCCCUUCAAGGA GCCGUUAGGC UCCGGG UUUUACAC | 5035 |
| 2380 | AAGUGCGG G CUCUGGGA | 1575 | UCCCAGAG GGA GCCGUUAGGC UCCCUUCAAGGA GCCGUUAGGC UCCGGG CCGCACUU | 5036 |
| 2392 | UGGGAGGA G UUAACGCA | 1576 | UGCGUUAA GGA GCCGUUAGGC UCCCUUCAAGGA GCCGUUAGGC UCCGGG UCCUCCCA | 5037 |
| 2401 | UUAACGCA G CCAGACGG | 1577 | CCGUCUGG GGA GCCGUUAGGC UCCCUUCAAGGA GCCGUUAGGC UCCGGG UGCGUUAA | 5038 |
| 2413 | GACGGAGA G UGAUACCC | 1578 | GGGUAUCA GGA GCCGUUAGGC UCCCUUCAAGGA GCCGUUAGGC UCCGGG UCUCCGUC | 5039 |
| 2424 | AUACCCCA G CAGAGUGG | 1579 | CCACUCUG GGA GCCGUUAGGC UCCCUUCAAGGA GCCGUUAGGC UCCGGG UGGGGUAU | 5040 |
| 2429 | CCAGCAGA G UGGAGCAC | 1580 | GUGCUCCA GGA GCCGUUAGGC UCCCUUCAAGGA GCCGUUAGGC UCCGGG UCUGCUGG | 5041 |
| 2434 | AGAGUGGA G CACUGUAC | 1581 | GUACAGUG GGA GCCGUUAGGC UCCCUUCAAGGA GCCGUUAGGC UCCGGG UCCACUCU | 5042 |
| 2450 | CAUACCUG G CUGGAUUG | 1582 | CAAUCCAG GGA GCCGUUAGGC UCCCUUCAAGGA GCCGUUAGGC UCCGGG CAGGUAUG | 5043 |
| 2523 | CAACACAA G CAAGUGUG | 1583 | CACACUUG GGA GCCGUUAGGC UCCCUUCAAGGA GCCGUUAGGC UCCGGG UUGUGUUG | 5044 |
| 2527 | ACAAGCAA G UGUGUUUC | 1584 | GAAACACA GGA GCCGUUAGGC UCCCUUCAAGGA GCCGUUAGGC UCCGGG UUGCUUGU | 5045 |
| 2537 | GUGUUUCA G CAGAACAU | 1585 | AUGUUCUG GGA GCCGUUAGGC UCCCUUCAAGGA GCCGUUAGGC UCCGGG UGAAACAC | 5046 |
| 2555 | CUCGGGAG G CUCAUUUG | 1586 | CAAAUGAG GGA GCCGUUAGGC UCCCUUCAAGGA GCCGUUAGGC UCCGGG CUCCCGAG | 5047 |
| 2566 | CAUUUGUG G CUUCUGAU | 1587 | AUCAGAAG GGA GCCGUUAGGC UCCCUUCAAGGA GCCGUUAGGC UCCGGG CACAAAUG | 5048 |
| 2612 | CCCACCUG G CCAAAUCA | 1588 | UGAUUUGG GGA GCCGUUAGGC UCCCUUCAAGGA GCCGUUAGGC UCCGGG CAGGUGGG | 5049 |
| 2632 | ACCUGAAG G CGGAAAUU | 1589 | AAUUUCCG GGA GCCGUUAGGC UCCCUUCAAGGA GCCGUUAGGC UCCGGG CUUCAGGU | 5050 |
| 2648 | UCACGGGG G CAGUCUCA | 1590 | UGAGACUG GGA GCCGUUAGGC UCCCUUCAAGGA GCCGUUAGGC UCCGGG CCCCGUGA | 5051 |
| 2651 | CGGGGGCA G UCUCAUUA | 1591 | UAAUGAGA GGA GCCGUUAGGC UCCCUUCAAGGA GCCGUUAGGC UCCGGG UGCCCCCG | 5052 |
| 2674 | CUUGGACA G CUCCUGGG | 1592 | CCCAGGAG GGA GCCGUUAGGC UCCCUUCAAGGA GCCGUUAGGC UCCGGG UGUCCAAG | 5053 |
| 2704 | AUGGAACA G CUCACAAG | 1593 | CUUGUGAG GGA GCCGUUAGGC UCCCUUCAAGGA GCCGUUAGGC UCCGGG UGUUCCAU | 5054 |
| 2712 | GCUCACAA G UAUAUCAU | 1594 | AUGAUAUA GGA GCCGUUAGGC UCCCUUCAAGGA GCCGUUAGGC UCCGGG UUGUGAGC | 5055 |
| 2729 | UCGAAUAA G UACAAGUA | 1595 | UACUUGUA GGA GCCGUUAGGC UCCCUUCAAGGA GCCGUUAGGC UCCGGG UUAUUCGA | 5056 |
| 2735 | AAGUACAA G UAUUCUUG | 1596 | CAAGAAUA GGA GCCGUUAGGC UCCCUUCAAGGA GCCGUUAGGC UCCGGG UUGUACUU | 5057 |
| 2757 | AGAGACAA G UUCAAUGA | 1597 | UCAUUGAA GGA GCCGUUAGGC UCCCUUCAAGGA GCCGUUAGGC UCCGGG UUGUCUCU | 5058 |
| 2776 | CUCUUCAA G UGAAUACU | 1598 | AGUAUUCA GGA GCCGUUAGGC UCCCUUCAAGGA GCCGUUAGGC UCCGGG UUGAAGAG | 5059 |
| 2806 | CAAAGGAA G CCAACUCU | 1599 | AGAGUUGG GGA GCCGUUAGGC UCCCUUCAAGGA GCCGUUAGGC UCCGGG UUCCUUUG | 5060 |
| 2821 | CUGAGGAA G UCUUUUUG | 1600 | CAAAAAGA GGA GCCGUUAGGC UCCCUUCAAGGA GCCGUUAGGC UCCGGG UUCCUCAG | 5061 |
| 2861 | UGAAAAUG G CACAGAUC | 1601 | GAUCUGUG GGA GCCGUUAGGC UCCCUUCAAGGA GCCGUUAGGC UCCGGG CAUUUUCA | 5062 |
| 2887 | CUAUUCAG G CUGUUGAU | 1602 | AUCAACAG GGA GCCGUUAGGC UCCCUUCAAGGA GCCGUUAGGC UCCGGG CUGAAUAG | 5063 |
| 2899 | UUGAUAAG G UCGAUCUG | 1603 | CAGAUCGA GGA GCCGUUAGGC UCCCUUCAAGGA GCCGUUAGGC UCCGGG CUUAUCAA | 5064 |
| 2935 | UUGCACGA G UAUCUUUG | 1604 | CAAAGAUA GGA GCCGUUAGGC UCCCUUCAAGGA GCCGUUAGGC UCCGGG UCGUGCAA | 5065 |
| 2978 | GACACCUA G UCCUGAUG | 1605 | CAUCAGGA GGA GCCGUUAGGC UCCCUUCAAGGA GCCGUUAGGC UCCGGG UAGGUGUC | 5066 |
| 2991 | GAUGAAAC G UCUGCUCC | 1606 | GGAGCAGA GGA GCCGUUAGGC UCCCUUCAAGGA GCCGUUAGGC UCCGGG GUUUCAUC | 5067 |
| 3023 | UAUCAACA G CACCAUUC | 1607 | GAAUGGUG GGA GCCGUUAGGC UCCCUUCAAGGA GCCGUUAGGC UCCGGG UGUUGAUA | 5068 |
| 3035 | CAUUCCUG G CAUUCACA | 1608 | UGUGAAUG GGA GCCGUUAGGC UCCCUUCAAGGA GCCGUUAGGC UCCGGG CAGGAAUG | 5069 |
| 3063 | AUGUGGAA G UGGAUAGG | 1609 | CCUAUCCA GGA GCCGUUAGGC UCCCUUCAAGGA GCCGUUAGGC UCCGGG UUCCACAU | 5070 |
| 3081 | GAACUGCA G CUGUCAAU | 1610 | AUUGACAG GGA GCCGUUAGGC UCCCUUCAAGGA GCCGUUAGGC UCCGGG UGCAGUUC | 5071 |
| 3091 | UGUCAAUA G CCUAGGGC | 1611 | GCCCUAGG GGA GCCGUUAGGC UCCCUUCAAGGA GCCGUUAGGC UCCGGG UAUUGACA | 5072 |
| 3098 | AGCCUAGG G CUGAAUUU | 1612 | AAAUUCAG GGA GCCGUUAGGC UCCCUUCAAGGA GCCGUUAGGC UCCGGG CCUAGGCU | 5073 |
| 3189 | UGUAGGGG G CGAUAUAC | 1613 | GUAUAUCG GGA GCCGUUAGGC UCCCUUCAAGGA GCCGUUAGGC UCCGGG CCCCUACA | 5074 |
| 3242 | UGUAGGGG G CGAUAUAC | 1613 | GUAUAUCG GGA GCCGUUAGGC UCCCUUCAAGGA GCCGUUAGGC UCCGGG CCCCUACA | 5074 |
| 3210 | UGUAUAUA G UACAUUUA | 1614 | UAAAUGUA GGA GCCGUUAGGC UCCCUUCAAGGA GCCGUUAGGC UCCGGG UAUAUACA | 5075 |
| 3279 | UGUAGGGG G CGAUAAAA | 1615 | UUUUAUCG GGA GCCGUUAGGC UCCCUUCAAGGA GCCGUUAGGC UCCGGG CCCCUACA | 5076 |
| 14 | AUGCUUUU G GUACAAAU | 1868 | AUUUGUAC GGA GCCGUUAGGC UCCCUUCAAGGA GCCGUUAGGC UCCGGG AAAAGCAU | 5077 |
| 23 | GUACAAAU G GAUGUGGA | 1869 | UCCACAUC GGA GCCGUUAGGC UCCCUUCAAGGA GCCGUUAGGC UCCGGG AUUUGUAC | 5078 |
| 24 | UACAAAUG G AUGUGGAA | 1870 | UUCCACAU GGA GCCGUUAGGC UCCCUUCAAGGA GCCGUUAGGC UCCGGG CAUUUGUA | 5079 |
| 29 | AUGGAUGU G GAAUAUAA | 1871 | UUAUAUUC GGA GCCGUUAGGC UCCCUUCAAGGA GCCGUUAGGC UCCGGG ACAUCCAU | 5080 |
| 30 | UGGAUGUG G AAUAUAAU | 1872 | AUUAUAUU GGA GCCGUUAGGC UCCCUUCAAGGA GCCGUUAGGC UCCGGG CACAUCCA | 5081 |
| 58 | UUGUUUAA G GGGAGCAU | 1873 | AUGCUCCC GGA GCCGUUAGGC UCCCUUCAAGGA GCCGUUAGGC UCCGGG UUAAACAA | 5082 |
| 59 | UGUUUAAG G GGAGCAUG | 1874 | CAUGCUCC GGA GCCGUUAGGC UCCCUUCAAGGA GCCGUUAGGC UCCGGG CUUAAACA | 5083 |
| 60 | GUUUAAGG G GAGCAUGA | 1875 | UCAUGCUC GGA GCCGUUAGGC UCCCUUCAAGGA GCCGUUAGGC UCCGGG CCUUAAAC | 5084 |
| 61 | UUUAAGGG G AGCAUGAA | 1876 | UUCAUGCU GGA GCCGUUAGGC UCCCUUCAAGGA GCCGUUAGGC UCCGGG CCCUUAAA | 5085 |
| 70 | AGCAUGAA G AGGUGUUG | 1877 | CAACACCU GGA GCCGUUAGGC UCCCUUCAAGGA GCCGUUAGGC UCCGGG UUCAUGCU | 5086 |
| 72 | CAUGAAGA G GUGUUGAG | 1878 | CUCAACAC GGA GCCGUUAGGC UCCCUUCAAGGA GCCGUUAGGC UCCGGG UCUUCAUG | 5087 |
| 80 | GGUGUUGA G GUUAUGUC | 1879 | GACAUAAC GGA GCCGUUAGGC UCCCUUCAAGGA GCCGUUAGGC UCCGGG UCAACACC | 5088 |
| 97 | AAGCAUCU G GCACAGCU | 1880 | AGCUGUGC GGA GCCGUUAGGC UCCCUUCAAGGA GCCGUUAGGC UCCGGG AGAUGCUU | 5089 |
| 109 | CAGCUGAA G GCAGAUGG | 1881 | CCAUCUGC GGA GCCGUUAGGC UCCCUUCAAGGA GCCGUUAGGC UCCGGG UUCAGCUG | 5090 |
| 113 | UGAAGGCA G AUGGAAAU | 1882 | AUUUCCAU GGA GCCGUUAGGC UCCCUUCAAGGA GCCGUUAGGC UCCGGG UGCCUUCA | 5091 |
| 116 | AGGCAGAU G GAAAUAUU | 1883 | AAUAUUUC GGA GCCGUUAGGC UCCCUUCAAGGA GCCGUUAGGC UCCGGG AUCUGCCU | 5092 |
| 117 | GGCAGAUG G AAAUAUUU | 1884 | AAAUAUUU GGA GCCGUUAGGC UCCCUUCAAGGA GCCGUUAGGC UCCGGG CAUCUGCC | 5093 |
| 143 | CAAUUUGA G ACUAAGAU | 1885 | AUCUUAGU GGA GCCGUUAGGC UCCCUUCAAGGA GCCGUUAGGC UCCGGG UCAAAUUG | 5094 |
| 149 | GAGACUAA G AUAUUGUU | 1886 | AACAAUAU GGA GCCGUUAGGC UCCCUUCAAGGA GCCGUUAGGC UCCGGG UUAGUCUC | 5095 |
| 175 | CUAUUGAA G ACAAGAGC | 1887 | GCUCUUGU GGA GCCGUUAGGC UCCCUUCAAGGA GCCGUUAGGC UCCGGG UUCAAUAG | 5096 |
| 180 | GAAGACAA G AGCAAUAG | 1888 | CUAUUGCU GGA GCCGUUAGGC UCCCUUCAAGGA GCCGUUAGGC UCCGGG UUGUCUUC | 5097 |
| 201 | ACACAUCA G GUCAGGGG | 1889 | CCCCUGAC GGA GCCGUUAGGC UCCCUUCAAGGA GCCGUUAGGC UCCGGG UGAUGUGU | 5098 |
| 206 | UCAGGUCA G GGGGUUAA | 1890 | UUAACCCC GGA GCCGUUAGGC UCCCUUCAAGGA GCCGUUAGGC UCCGGG UGACCUGA | 5099 |
| 207 | CAGGUCAG G GGGUUAAA | 1891 | UUUAACCC GGA GCCGUUAGGC UCCCUUCAAGGA GCCGUUAGGC UCCGGG CUGACCUG | 5100 |
| 208 | AGGUCAGG G GGUUAAAG | 1892 | CUUUAACC GGA GCCGUUAGGC UCCCUUCAAGGA GCCGUUAGGC UCCGGG CCUGACCU | 5101 |
| 209 | GGUCAGGG G GUUAAAGA | 1893 | UCUUUAAC GGA GCCGUUAGGC UCCCUUCAAGGA GCCGUUAGGC UCCGGG CCCUGACC | 5102 |
| 216 | GGGUUAAA G ACCUGUGA | 1894 | UCACAGGU GGA GCCGUUAGGC UCCCUUCAAGGA GCCGUUAGGC UCCGGG UUUAACCC | 5103 |
| 245 | GAUAAGUU G GAAACGUG | 1895 | CACGUUUC GGA GCCGUUAGGC UCCCUUCAAGGA GCCGUUAGGC UCCGGG AACUUAUC | 5104 |
| 246 | AUAAGUUG G AAACGUGU | 1896 | ACACGUUU GGA GCCGUUAGGC UCCCUUCAAGGA GCCGUUAGGC UCCGGG CAACUUAU | 5105 |
| 286 | UAUAUAAU G GUAAAGAA | 1897 | UUCUUUAC GGA GCCGUUAGGC UCCCUUCAAGGA GCCGUUAGGC UCCGGG AUUAUAUA | 5106 |
| 292 | AUGGUAAA G AAAGACAC | 1898 | GUGUCUUU GGA GCCGUUAGGC UCCCUUCAAGGA GCCGUUAGGC UCCGGG UUUACCAU | 5107 |
| 296 | UAAAGAAA G ACACCUUC | 1899 | GAAGGUGU GGA GCCGUUAGGC UCCCUUCAAGGA GCCGUUAGGC UCCGGG UUUCUUUA | 5108 |
| 324 | UUUCCAAA G AGAGGAAU | 1900 | AUUCCUCU GGA GCCGUUAGGC UCCCUUCAAGGA GCCGUUAGGC UCCGGG UUUGGAAA | 5109 |
| 326 | UCCAAAGA G AGGAAUCA | 1901 | UGAUUCCU GGA GCCGUUAGGC UCCCUUCAAGGA GCCGUUAGGC UCCGGG UCUUUGGA | 5110 |
| 328 | CAAAGAGA G GAAUCACA | 1902 | UGUGAUUC GGA GCCGUUAGGC UCCCUUCAAGGA GCCGUUAGGC UCCGGG UCUCUUUG | 5111 |
| 329 | AAAGAGAG G AAUCACAG | 1903 | CUGUGAUU GGA GCCGUUAGGC UCCCUUCAAGGA GCCGUUAGGC UCCGGG CUCUCUUU | 5112 |
| 337 | GAAUCACA G GGAGAUGU | 1904 | ACAUCUCC GGA GCCGUUAGGC UCCCUUCAAGGA GCCGUUAGGC UCCGGG UGUGAUUC | 5113 |
| 338 | AAUCACAG G GAGAUGUA | 1905 | UACAUCUC GGA GCCGUUAGGC UCCCUUCAAGGA GCCGUUAGGC UCCGGG CUGUGAUU | 5114 |
| 339 | AUCACAGG G AGAUGUAC | 1906 | GUACAUCU GGA GCCGUUAGGC UCCCUUCAAGGA GCCGUUAGGC UCCGGG CCUGUGAU | 5115 |
| 341 | CACAGGGA G AUGUACAG | 1907 | CUGUACAU GGA GCCGUUAGGC UCCCUUCAAGGA GCCGUUAGGC UCCGGG UCCCUGUG | 5116 |
| 354 | ACAGCAAU G GGGCCAUU | 1908 | AAUGGCCC GGA GCCGUUAGGC UCCCUUCAAGGA GCCGUUAGGC UCCGGG AUUGCUGU | 5117 |
| 355 | CAGCAAUG G GGCCAUUU | 1909 | AAAUGGCC GGA GCCGUUAGGC UCCCUUCAAGGA GCCGUUAGGC UCCGGG CAUUGCUG | 5118 |
| 356 | AGCAAUGG G GCCAUUUA | 1910 | UAAAUGGC GGA GCCGUUAGGC UCCCUUCAAGGA GCCGUUAGGC UCCGGG CCAUUGCU | 5119 |
| 366 | CCAUUUAA G AGUUCUGU | 1911 | ACAGAACU GGA GCCGUUAGGC UCCCUUCAAGGA GCCGUUAGGC UCCGGG UUAAAUGG | 5120 |
| 400 | ACCUUCUA G AAGGGGCC | 1912 | GGCCCCUU GGA GCCGUUAGGC UCCCUUCAAGGA GCCGUUAGGC UCCGGG UAGAAGGU | 5121 |
| 403 | UUCUAGAA G GGGCCCUG | 1913 | CAGGGCCC GGA GCCGUUAGGC UCCCUUCAAGGA GCCGUUAGGC UCCGGG UUCUAGAA | 5122 |
| 404 | UCUAGAAG G GGCCCUGA | 1914 | UCAGGGCC GGA GCCGUUAGGC UCCCUUCAAGGA GCCGUUAGGC UCCGGG CUUCUAGA | 5123 |
| 405 | CUAGAAGG G GCCCUGAG | 1915 | CUCAGGGC GGA GCCGUUAGGC UCCCUUCAAGGA GCCGUUAGGC UCCGGG CCUUCUAG | 5124 |
| 442 | ACAACAAU G GCUAUGAA | 1916 | UUCAUAGC GGA GCCGUUAGGC UCCCUUCAAGGA GCCGUUAGGC UCCGGG AUUGUUGU | 5125 |
| 451 | GCUAUGAA G GCAUUGUC | 1917 | GACAAUGC GGA GCCGUUAGGC UCCCUUCAAGGA GCCGUUAGGC UCCGGG UUCAUAGC | 5126 |
| 484 | AUGUGCCA G AAGAUGAA | 1918 | UUCAUCUU GGA GCCGUUAGGC UCCCUUCAAGGA GCCGUUAGGC UCCGGG UGGCACAU | 5127 |
| 487 | UGCCAGAA G AUGAAACA | 1919 | UGUUUCAU GGA GCCGUUAGGC UCCCUUCAAGGA GCCGUUAGGC UCCGGG UUCUGGCA | 5128 |
| 513 | CAAAUAAA G GACAUGGU | 1920 | ACCAUGUC GGA GCCGUUAGGC UCCCUUCAAGGA GCCGUUAGGC UCCGGG UUUAUUUG | 5129 |
| 514 | AAAUAAAG G ACAUGGUG | 1921 | CACCAUGU GGA GCCGUUAGGC UCCCUUCAAGGA GCCGUUAGGC UCCGGG CUUUAUUU | 5130 |
| 519 | AAGGACAU G GUGACCCA | 1922 | UGGGUCAC GGA GCCGUUAGGC UCCCUUCAAGGA GCCGUUAGGC UCCGGG AUGUCCUU | 5131 |
| 528 | GUGACCCA G GCAUCUCU | 1923 | AGAGAUGC GGA GCCGUUAGGC UCCCUUCAAGGA GCCGUUAGGC UCCGGG UGGGUCAC | 5132 |
| 556 | AAGCUACA G GAAAGCGA | 1924 | UCGCUUUC GGA GCCGUUAGGC UCCCUUCAAGGA GCCGUUAGGC UCCGGG UGUAGCUU | 5133 |
| 557 | AGCUACAG G AAAGCGAU | 1925 | AUCGCUUU GGA GCCGUUAGGC UCCCUUCAAGGA GCCGUUAGGC UCCGGG CUGUAGCU | 5134 |
| 605 | UGAAACAU G GAAGACAA | 1926 | UUGUCUUC GGA GCCGUUAGGC UCCCUUCAAGGA GCCGUUAGGC UCCGGG AUGUUUCA | 5135 |
| 606 | GAAACAUG G AAGACAAA | 1927 | UUUGUCUU GGA GCCGUUAGGC UCCCUUCAAGGA GCCGUUAGGC UCCGGG CAUGUUUC | 5136 |
| 609 | ACAUGGAA G ACAAAGGC | 1928 | GCCUUUGU GGA GCCGUUAGGC UCCCUUCAAGGA GCCGUUAGGC UCCGGG UUCCAUGU | 5137 |
| 615 | AAGACAAA G GCUGACUA | 1929 | UAGUCAGC GGA GCCGUUAGGC UCCCUUCAAGGA GCCGUUAGGC UCCGGG UUUGUCUU | 5138 |
| 629 | CUAUGUGA G ACCAAAAC | 1930 | GUUUUGGU GGA GCCGUUAGGC UCCCUUCAAGGA GCCGUUAGGC UCCGGG UCACAUAG | 5139 |
| 642 | AAACUUGA G ACCUACAA | 1931 | UUGUAGGU GGA GCCGUUAGGC UCCCUUCAAGGA GCCGUUAGGC UCCGGG UCAAGUUU | 5140 |
| 666 | GAUGUUCU G GUUGCUGA | 1932 | UCAGCAAC GGA GCCGUUAGGC UCCCUUCAAGGA GCCGUUAGGC UCCGGG AGAACAUC | 5141 |
| 688 | CUCCUCCA G GUAAUGAU | 1933 | AUCAUUAC GGA GCCGUUAGGC UCCCUUCAAGGA GCCGUUAGGC UCCGGG UGGAGGAG | 5142 |
| 714 | ACUGAGCA G AUGGGCAA | 1934 | UUGCCCAU GGA GCCGUUAGGC UCCCUUCAAGGA GCCGUUAGGC UCCGGG UGCUCAGU | 5143 |
| 717 | GAGCAGAU G GGCAACUG | 1935 | CAGUUGCC GGA GCCGUUAGGC UCCCUUCAAGGA GCCGUUAGGC UCCGGG AUCUGCUC | 5144 |
| 718 | AGCAGAUG G GCAACUGU | 1936 | ACAGUUGC GGA GCCGUUAGGC UCCCUUCAAGGA GCCGUUAGGC UCCGGG CAUCUGCU | 5145 |
| 727 | GCAACUGU G GAGAGAAG | 1937 | CUUCUCUC GGA GCCGUUAGGC UCCCUUCAAGGA GCCGUUAGGC UCCGGG ACAGUUGC | 5146 |
| 728 | CAACUGUG G AGAGAAGG | 1938 | CCUUCUCU GGA GCCGUUAGGC UCCCUUCAAGGA GCCGUUAGGC UCCGGG CACAGUUG | 5147 |
| 730 | ACUGUGGA G AGAAGGGU | 1939 | ACCCUUCU GGA GCCGUUAGGC UCCCUUCAAGGA GCCGUUAGGC UCCGGG UCCACAGU | 5148 |
| 732 | UGUGGAGA G AAGGGUGA | 1940 | UCACCCUU GGA GCCGUUAGGC UCCCUUCAAGGA GCCGUUAGGC UCCGGG UCUCCACA | 5149 |
| 735 | GGAGAGAA G GGUGAAAG | 1941 | CUUUCACC GGA GCCGUUAGGC UCCCUUCAAGGA GCCGUUAGGC UCCGGG UUCUCUCC | 5150 |
| 736 | GAGAGAAG G GUGAAAGG | 1942 | CCUUUCAC GGA GCCGUUAGGC UCCCUUCAAGGA GCCGUUAGGC UCCGGG CUUCUCUC | 5151 |
| 743 | GGGUGAAA G GAUCCACC | 1943 | GGUGGAUC GGA GCCGUUAGGC UCCCUUCAAGGA GCCGUUAGGC UCCGGG UUUCACCC | 5152 |
| 744 | GGUGAAAG G AUCCACCU | 1944 | AGGUGGAU GGA GCCGUUAGGC UCCCUUCAAGGA GCCGUUAGGC UCCGGG CUUUCACC | 5153 |
| 772 | UCAUUGCA G GAAAAAAG | 1945 | CUUUUUUC GGA GCCGUUAGGC UCCCUUCAAGGA GCCGUUAGGC UCCGGG UGCAAUGA | 5154 |
| 773 | CAUUGCAG G AAAAAAGU | 1946 | ACUUUUUU GGA GCCGUUAGGC UCCCUUCAAGGA GCCGUUAGGC UCCGGG CUGCAAUG | 5155 |
| 793 | CUGAAUAU G GACCACAA | 1947 | UUGUGGUC GGA GCCGUUAGGC UCCCUUCAAGGA GCCGUUAGGC UCCGGG AUAUUCAG | 5156 |
| 794 | UGAAUAUG G ACCACAAG | 1948 | CUUGUGGU GGA GCCGUUAGGC UCCCUUCAAGGA GCCGUUAGGC UCCGGG CAUAUUCA | 5157 |
| 802 | GACCACAA G GUAAGGCA | 1949 | UGCCUUAC GGA GCCGUUAGGC UCCCUUCAAGGA GCCGUUAGGC UCCGGG UUGUGGUC | 5158 |
| 807 | CAAGGUAA G GCAUUUGU | 1950 | ACAAAUGC GGA GCCGUUAGGC UCCCUUCAAGGA GCCGUUAGGC UCCGGG UUACCUUG | 5159 |
| 824 | CCAUGAGU G GGCUCAUC | 1951 | GAUGAGCC GGA GCCGUUAGGC UCCCUUCAAGGA GCCGUUAGGC UCCGGG ACUCAUGG | 5160 |
| 825 | CAUGAGUG G GCUCAUCU | 1952 | AGAUGAGC GGA GCCGUUAGGC UCCCUUCAAGGA GCCGUUAGGC UCCGGG CACUCAUG | 5161 |
| 839 | UCUACGAU G GGGAGUAU | 1953 | AUACUCCC GGA GCCGUUAGGC UCCCUUCAAGGA GCCGUUAGGC UCCGGG AUCGUAGA | 5162 |
| 840 | CUACGAUG G GGAGUAUU | 1954 | AAUACUCC GGA GCCGUUAGGC UCCCUUCAAGGA GCCGUUAGGC UCCGGG CAUCGUAG | 5163 |
| 841 | UACGAUGG G GAGUAUUU | 1955 | AAAUACUC GGA GCCGUUAGGC UCCCUUCAAGGA GCCGUUAGGC UCCGGG CCAUCGUA | 5164 |
| 842 | ACGAUGGG G AGUAUUUG | 1956 | CAAAUACU GGA GCCGUUAGGC UCCCUUCAAGGA GCCGUUAGGC UCCGGG CCCAUCGU | 5165 |
| 870 | AAUGAUGA G AAAUUCUA | 1957 | UAGAAUUU GGA GCCGUUAGGC UCCCUUCAAGGA GCCGUUAGGC UCCGGG UCAUCAUU | 5166 |
| 889 | UAUCCAAU G GAAGAAUA | 1958 | UAUUCUUC GGA GCCGUUAGGC UCCCUUCAAGGA GCCGUUAGGC UCCGGG AUUGGAUA | 5167 |
| 890 | AUCCAAUG G AAGAAUAC | 1959 | GUAUUCUU GGA GCCGUUAGGC UCCCUUCAAGGA GCCGUUAGGC UCCGGG CAUUGGAU | 5168 |
| 893 | CAAUGGAA G AAUACAAG | 1960 | CUUGUAUU GGA GCCGUUAGGC UCCCUUCAAGGA GCCGUUAGGC UCCGGG UUCCAUUG | 5169 |
| 908 | AGCAGUAA G AUGUUCAG | 1961 | CUGAACAU GGA GCCGUUAGGC UCCCUUCAAGGA GCCGUUAGGC UCCGGG UUACUGCU | 5170 |
| 919 | GUUCAGCA G GUAUUACU | 1962 | AGUAAUAC GGA GCCGUUAGGC UCCCUUCAAGGA GCCGUUAGGC UCCGGG UGCUGAAC | 5171 |
| 928 | GUAUUACU G GUACAAAU | 1963 | AUUUGUAC GGA GCCGUUAGGC UCCCUUCAAGGA GCCGUUAGGC UCCGGG AGUAAUAC | 5172 |
| 945 | GUAGUAAA G AAGUGUCA | 1964 | UGACACUU GGA GCCGUUAGGC UCCCUUCAAGGA GCCGUUAGGC UCCGGG UUUACUAC | 5173 |
| 954 | AAGUGUCA G GGAGGCAG | 1965 | CUGCCUCC GGA GCCGUUAGGC UCCCUUCAAGGA GCCGUUAGGC UCCGGG UGACACUU | 5174 |
| 955 | AGUGUCAG G GAGGCAGC | 1966 | GCUGCCUC GGA GCCGUUAGGC UCCCUUCAAGGA GCCGUUAGGC UCCGGG CUGACACU | 5175 |
| 956 | GUGUCAGG G AGGCAGCU | 1967 | AGCUGCCU GGA GCCGUUAGGC UCCCUUCAAGGA GCCGUUAGGC UCCGGG CCUGACAC | 5176 |
| 958 | GUCAGGGA G GCAGCUGU | 1968 | ACAGCUGC GGA GCCGUUAGGC UCCCUUCAAGGA GCCGUUAGGC UCCGGG UCCCUGAC | 5177 |
| 977 | CACCAAAA G AUGCACAU | 1969 | AUGUGCAU GGA GCCGUUAGGC UCCCUUCAAGGA GCCGUUAGGC UCCGGG UUUUGGUG | 5178 |
| 1000 | AAGUUACA G GACUCUAU | 1970 | AUAGAGUC GGA GCCGUUAGGC UCCCUUCAAGGA GCCGUUAGGC UCCGGG UGUAACUU | 5179 |
| 1001 | AGUUACAG G ACUCUAUG | 1971 | CAUAGAGU GGA GCCGUUAGGC UCCCUUCAAGGA GCCGUUAGGC UCCGGG CUGUAACU | 5180 |
| 1015 | AUGAAAAA G GAUGUGAG | 1972 | CUCACAUC GGA GCCGUUAGGC UCCCUUCAAGGA GCCGUUAGGC UCCGGG UUUUUCAU | 5181 |
| 1016 | UGAAAAAG G AUGUGAGU | 1973 | ACUCACAU GGA GCCGUUAGGC UCCCUUCAAGGA GCCGUUAGGC UCCGGG CUUUUUCA | 5182 |
| 1044 | UCCCGCCA G ACGGAGAA | 1974 | UUCUCCGU GGA GCCGUUAGGC UCCCUUCAAGGA GCCGUUAGGC UCCGGG UGGCGGGA | 5183 |
| 1047 | CGCCAGAC G GAGAAGGC | 1975 | GCCUUCUC GGA GCCGUUAGGC UCCCUUCAAGGA GCCGUUAGGC UCCGGG GUCUGGCG | 5184 |
| 1048 | GCCAGACG G AGAAGGCU | 1976 | AGCCUUCU GGA GCCGUUAGGC UCCCUUCAAGGA GCCGUUAGGC UCCGGG CGUCUGGC | 5185 |
| 1050 | CAGACGGA G AAGGCUUC | 1977 | GAAGCCUU GGA GCCGUUAGGC UCCCUUCAAGGA GCCGUUAGGC UCCGGG UCCGUCUG | 5186 |
| 1053 | ACGGAGAA G GCUUCUAU | 1978 | AUAGAAGC GGA GCCGUUAGGC UCCCUUCAAGGA GCCGUUAGGC UCCGGG UUCUCCGU | 5187 |
| 1105 | UCUGUACA G AACAAAAC | 1979 | GUUUUGUU GGA GCCGUUAGGC UCCCUUCAAGGA GCCGUUAGGC UCCGGG UGUACAGA | 5188 |
| 1123 | ACAACAAA G AAGCUCCA | 1980 | UGGAGCUU GGA GCCGUUAGGC UCCCUUCAAGGA GCCGUUAGGC UCCGGG UUUGUUGU | 5189 |
| 1169 | AAGCACAU G GGAAGUGA | 1981 | UCACUUCC GGA GCCGUUAGGC UCCCUUCAAGGA GCCGUUAGGC UCCGGG AUGUGCUU | 5190 |
| 1170 | AGCACAUG G GAAGUGAU | 1982 | AUCACUUC GGA GCCGUUAGGC UCCCUUCAAGGA GCCGUUAGGC UCCGGG CAUGUGCU | 5191 |
| 1171 | GCACAUGG G AAGUGAUC | 1983 | GAUCACUU GGA GCCGUUAGGC UCCCUUCAAGGA GCCGUUAGGC UCCGGG CCAUGUGC | 5192 |
| 1191 | GAUUCUGA G GACUUUAA | 1984 | UUAAAGUC GGA GCCGUUAGGC UCCCUUCAAGGA GCCGUUAGGC UCCGGG UCAGAAUC | 5193 |
| 1192 | AUUCUGAG G ACUUUAAG | 1985 | CUUAAAGU GGA GCCGUUAGGC UCCCUUCAAGGA GCCGUUAGGC UCCGGG CUCAGAAU | 5194 |
| 1200 | GACUUUAA G AAAACCAC | 1986 | GUGGUUUU GGA GCCGUUAGGC UCCCUUCAAGGA GCCGUUAGGC UCCGGG UUAAAGUC | 5195 |
| 1254 | UUGCUGCA G AUUGGACA | 1987 | UGUCCAAU GGA GCCGUUAGGC UCCCUUCAAGGA GCCGUUAGGC UCCGGG UGCAGCAA | 5196 |
| 1258 | UGCAGAUU G GACAAAGA | 1988 | UCUUUGUC GGA GCCGUUAGGC UCCCUUCAAGGA GCCGUUAGGC UCCGGG AAUCUGCA | 5197 |
| 1259 | GCAGAUUG G ACAAAGAA | 1989 | UUCUUUGU GGA GCCGUUAGGC UCCCUUCAAGGA GCCGUUAGGC UCCGGG CAAUCUGC | 5198 |
| 1265 | UGGACAAA G AAUUGUGU | 1990 | ACACAAUU GGA GCCGUUAGGC UCCCUUCAAGGA GCCGUUAGGC UCCGGG UUUGUCCA | 5199 |
| 1294 | ACAAAUCU G GAAGCAUG | 1991 | CAUGCUUC GGA GCCGUUAGGC UCCCUUCAAGGA GCCGUUAGGC UCCGGG AGAUUUGU | 5200 |
| 1295 | CAAAUCUG G AAGCAUGG | 1992 | CCAUGCUU GGA GCCGUUAGGC UCCCUUCAAGGA GCCGUUAGGC UCCGGG CAGAUUUG | 5201 |
| 1302 | GGAAGCAU G GCGACUGG | 1993 | CCAGUCGC GGA GCCGUUAGGC UCCCUUCAAGGA GCCGUUAGGC UCCGGG AUGCUUCC | 5202 |
| 1309 | UGGCGACU G GUAACCGC | 1994 | GCGGUUAC GGA GCCGUUAGGC UCCCUUCAAGGA GCCGUUAGGC UCCGGG AGUCGCCA | 5203 |
| 1339 | AUCAAGCA G GCCAGCUU | 1995 | AAGCUGGC GGA GCCGUUAGGC UCCCUUCAAGGA GCCGUUAGGC UCCGGG UGCUUGAU | 5204 |
| 1359 | CUGCUGCA G ACAGUUGA | 1996 | UCAACUGU GGA GCCGUUAGGC UCCCUUCAAGGA GCCGUUAGGC UCCGGG UGCAGCAG | 5205 |
| 1371 | GUUGAGCU G GGGUCCUG | 1997 | CAGGACCC GGA GCCGUUAGGC UCCCUUCAAGGA GCCGUUAGGC UCCGGG AGCUCAAC | 5206 |
| 1372 | UUGAGCUG G GGUCCUGG | 1998 | CCAGGACC GGA GCCGUUAGGC UCCCUUCAAGGA GCCGUUAGGC UCCGGG CAGCUCAA | 5207 |
| 1373 | UGAGCUGG G GUCCUGGG | 1999 | CCCAGGAC GGA GCCGUUAGGC UCCCUUCAAGGA GCCGUUAGGC UCCGGG CCAGCUCA | 5208 |
| 1379 | GGGGUCCU G GGUUGGGA | 2000 | UCCCAACC GGA GCCGUUAGGC UCCCUUCAAGGA GCCGUUAGGC UCCGGG AGGACCCC | 5209 |
| 1380 | GGGUCCUG G GUUGGGAU | 2001 | AUCCCAAC GGA GCCGUUAGGC UCCCUUCAAGGA GCCGUUAGGC UCCGGG CAGGACCC | 5210 |
| 1384 | CCUGGGUU G GGAUGGUG | 2002 | CACCAUCC GGA GCCGUUAGGC UCCCUUCAAGGA GCCGUUAGGC UCCGGG AACCCAGG | 5211 |
| 1385 | CUGGGUUG G GAUGGUGA | 2003 | UCACCAUC GGA GCCGUUAGGC UCCCUUCAAGGA GCCGUUAGGC UCCGGG CAACCCAG | 5212 |
| 1386 | UGGGUUGG G AUGGUGAC | 2004 | GUCACCAU GGA GCCGUUAGGC UCCCUUCAAGGA GCCGUUAGGC UCCGGG CCAACCCA | 5213 |
| 1389 | GUUGGGAU G GUGACAUU | 2005 | AAUGUCAC GGA GCCGUUAGGC UCCCUUCAAGGA GCCGUUAGGC UCCGGG AUCCCAAC | 5214 |
| 1434 | CUCAUACA G AUAAACAG | 2006 | CUGUUUAU GGA GCCGUUAGGC UCCCUUCAAGGA GCCGUUAGGC UCCGGG UGUAUGAG | 5215 |
| 1444 | UAAACAGU G GCAGUGAC | 2007 | GUCACUGC GGA GCCGUUAGGC UCCCUUCAAGGA GCCGUUAGGC UCCGGG ACUGUUUA | 5216 |
| 1454 | CAGUGACA G GGACACAC | 2008 | GUGUGUCC GGA GCCGUUAGGC UCCCUUCAAGGA GCCGUUAGGC UCCGGG UGUCACUG | 5217 |
| 1455 | AGUGACAG G GACACACU | 2009 | AGUGUGUC GGA GCCGUUAGGC UCCCUUCAAGGA GCCGUUAGGC UCCGGG CUGUCACU | 5218 |
| 1456 | GUGACAGG G ACACACUC | 2010 | GAGUGUGU GGA GCCGUUAGGC UCCCUUCAAGGA GCCGUUAGGC UCCGGG CCUGUCAC | 5219 |
| 1472 | CGCCAAAA G AUUACCUG | 2011 | CAGGUAAU GGA GCCGUUAGGC UCCCUUCAAGGA GCCGUUAGGC UCCGGG UUUUGGCG | 5220 |
| 1492 | CAGCUUCA G GAGGGACG | 2012 | CGUCCCUC GGA GCCGUUAGGC UCCCUUCAAGGA GCCGUUAGGC UCCGGG UGAAGCUG | 5221 |
| 1493 | AGCUUCAG G AGGGACGU | 2013 | ACGUCCCU GGA GCCGUUAGGC UCCCUUCAAGGA GCCGUUAGGC UCCGGG CUGAAGCU | 5222 |
| 1495 | CUUCAGGA G GGACGUCC | 2014 | GGACGUCC GGA GCCGUUAGGC UCCCUUCAAGGA GCCGUUAGGC UCCGGG UCCUGAAG | 5223 |
| 1496 | UUCAGGAG G GACGUCCA | 2015 | UGGACGUC GGA GCCGUUAGGC UCCCUUCAAGGA GCCGUUAGGC UCCGGG CUCCUGAA | 5224 |
| 1497 | UCAGGAGG G ACGUCCAU | 2016 | AUGGACGU GGA GCCGUUAGGC UCCCUUCAAGGA GCCGUUAGGC UCCGGG CCUCCUGA | 5225 |
| 1513 | UCUGCAGC G GGCUUCGA | 2017 | UCGAAGCC GGA GCCGUUAGGC UCCCUUCAAGGA GCCGUUAGGC UCCGGG GCUGCAGA | 5226 |
| 1514 | CUGCAGCG G GCUUCGAU | 2018 | AUCGAAGC GGA GCCGUUAGGC UCCCUUCAAGGA GCCGUUAGGC UCCGGG CGCUGCAG | 5227 |
| 1524 | CUUCGAUC G GCAUUUAC | 2019 | GUAAAUGC GGA GCCGUUAGGC UCCCUUCAAGGA GCCGUUAGGC UCCGGG GAUCGAAG | 5228 |
| 1541 | UGUGAUUA G GAAGAAAU | 2020 | AUUUCUUC GGA GCCGUUAGGC UCCCUUCAAGGA GCCGUUAGGC UCCGGG UAAUCACA | 5229 |
| 1542 | GUGAUUAG G AAGAAAUA | 2021 | UAUUUCUU GGA GCCGUUAGGC UCCCUUCAAGGA GCCGUUAGGC UCCGGG CUAAUCAC | 5230 |
| 1545 | AUUAGGAA G AAAUAUCC | 2022 | GGAUAUUU GGA GCCGUUAGGC UCCCUUCAAGGA GCCGUUAGGC UCCGGG UUCCUAAU | 5231 |
| 1561 | CAACUGAU G GAUCUGAA | 2023 | UUCAGAUC GGA GCCGUUAGGC UCCCUUCAAGGA GCCGUUAGGC UCCGGG AUCAGUUG | 5232 |
| 1562 | AACUGAUG G AUCUGAAA | 2024 | UUUCAGAU GGA GCCGUUAGGC UCCCUUCAAGGA GCCGUUAGGC UCCGGG CAUCAGUU | 5233 |
| 1584 | CUGCUGAC G GAUGGGGA | 2025 | UCCCCAUC GGA GCCGUUAGGC UCCCUUCAAGGA GCCGUUAGGC UCCGGG GUCAGCAG | 5234 |
| 1585 | UGCUGACG G AUGGGGAA | 2026 | UUCCCCAU GGA GCCGUUAGGC UCCCUUCAAGGA GCCGUUAGGC UCCGGG CGUCAGCA | 5235 |
| 1588 | UGACGGAU G GGGAAGAC | 2027 | GUCUUCCC GGA GCCGUUAGGC UCCCUUCAAGGA GCCGUUAGGC UCCGGG AUCCGUCA | 5236 |
| 1589 | GACGGAUG G GGAAGACA | 2028 | UGUCUUCC GGA GCCGUUAGGC UCCCUUCAAGGA GCCGUUAGGC UCCGGG CAUCCGUC | 5237 |
| 1590 | ACGGAUGG G GAAGACAA | 2029 | UUGUCUUC GGA GCCGUUAGGC UCCCUUCAAGGA GCCGUUAGGC UCCGGG CCAUCCGU | 5238 |
| 1591 | CGGAUGGG G AAGACAAC | 2030 | GUUGUCUU GGA GCCGUUAGGC UCCCUUCAAGGA GCCGUUAGGC UCCGGG CCCAUCCG | 5239 |
| 1594 | AUGGGGAA G ACAACACU | 2031 | AGUGUUGU GGA GCCGUUAGGC UCCCUUCAAGGA GCCGUUAGGC UCCGGG UUCCCCAU | 5240 |
| 1609 | CUAUAAGU G GGUGCUUU | 2032 | AAAGCACC GGA GCCGUUAGGC UCCCUUCAAGGA GCCGUUAGGC UCCGGG ACUUAUAG | 5241 |
| 1610 | UAUAAGUG G GUGCUUUA | 2033 | UAAAGCAC GGA GCCGUUAGGC UCCCUUCAAGGA GCCGUUAGGC UCCGGG CACUUAUA | 5242 |
| 1623 | UUUAACGA G GUCAAACA | 2034 | UGUUUGAC GGA GCCGUUAGGC UCCCUUCAAGGA GCCGUUAGGC UCCGGG UCGUUAAA | 5243 |
| 1636 | AACAAAGU G GUGCCAUC | 2035 | GAUGGCAC GGA GCCGUUAGGC UCCCUUCAAGGA GCCGUUAGGC UCCGGG ACUUUGUU | 5244 |
| 1662 | GUCGCUUU G GGGCCCUC | 2036 | GAGGGCCC GGA GCCGUUAGGC UCCCUUCAAGGA GCCGUUAGGC UCCGGG AAAGCGAC | 5245 |
| 1663 | UCGCUUUG G GGCCCUCU | 2037 | AGAGGGCC GGA GCCGUUAGGC UCCCUUCAAGGA GCCGUUAGGC UCCGGG CAAAGCGA | 5246 |
| 1664 | CGCUUUGG G GCCCUCUG | 2038 | CAGAGGGC GGA GCCGUUAGGC UCCCUUCAAGGA GCCGUUAGGC UCCGGG CCAAAGCG | 5247 |
| 1681 | CAGCUCAA G AACUAGAG | 2039 | CUCUAGUU GGA GCCGUUAGGC UCCCUUCAAGGA GCCGUUAGGC UCCGGG UUGAGCUG | 5248 |
| 1687 | AAGAACUA G AGGAGCUG | 2040 | CAGCUCCU GGA GCCGUUAGGC UCCCUUCAAGGA GCCGUUAGGC UCCGGG UAGUUCUU | 5249 |
| 1689 | GAACUAGA G GAGCUGUC | 2041 | GACAGCUC GGA GCCGUUAGGC UCCCUUCAAGGA GCCGUUAGGC UCCGGG UCUAGUUC | 5250 |
| 1690 | AACUAGAG G AGCUGUCC | 2042 | GGACAGCU GGA GCCGUUAGGC UCCCUUCAAGGA GCCGUUAGGC UCCGGG CUCUAGUU | 5251 |
| 1708 | AAAUGACA G GAGGUUUA | 2043 | UAAACCUC GGA GCCGUUAGGC UCCCUUCAAGGA GCCGUUAGGC UCCGGG UGUCAUUU | 5252 |
| 1709 | AAUGACAG G AGGUUUAC | 2044 | GUAAACCU GGA GCCGUUAGGC UCCCUUCAAGGA GCCGUUAGGC UCCGGG CUGUCAUU | 5253 |
| 1711 | UGACAGGA G GUUUACAG | 2045 | CUGUAAAC GGA GCCGUUAGGC UCCCUUCAAGGA GCCGUUAGGC UCCGGG UCCUGUCA | 5254 |
| 1719 | GGUUUACA G ACAUAUGC | 2046 | GCAUAUGU GGA GCCGUUAGGC UCCCUUCAAGGA GCCGUUAGGC UCCGGG UGUAAACC | 5255 |
| 1732 | AUGCUUCA G AUCAAGUU | 2047 | AACUUGAU GGA GCCGUUAGGC UCCCUUCAAGGA GCCGUUAGGC UCCGGG UGAAGCAU | 5256 |
| 1743 | CAAGUUCA G AACAAUGG | 2048 | CCAUUGUU GGA GCCGUUAGGC UCCCUUCAAGGA GCCGUUAGGC UCCGGG UGAACUUG | 5257 |
| 1750 | AGAACAAU G GCCUCAUU | 2049 | AAUGAGGC GGA GCCGUUAGGC UCCCUUCAAGGA GCCGUUAGGC UCCGGG AUUGUUCU | 5258 |
| 1768 | AUGCUUUU G GGGCCCUU | 2050 | AAGGGCCC GGA GCCGUUAGGC UCCCUUCAAGGA GCCGUUAGGC UCCGGG AAAAGCAU | 5259 |
| 1769 | UGCUUUUG G GGCCCUUU | 2051 | AAAGGGCC GGA GCCGUUAGGC UCCCUUCAAGGA GCCGUUAGGC UCCGGG CAAAAGCA | 5260 |
| 1770 | GCUUUUGG G GCCCUUUC | 2052 | GAAAGGGC GGA GCCGUUAGGC UCCCUUCAAGGA GCCGUUAGGC UCCGGG CCAAAAGC | 5261 |
| 1783 | UUUCAUCA G GAAAUGGA | 2053 | UCCAUUUC GGA GCCGUUAGGC UCCCUUCAAGGA GCCGUUAGGC UCCGGG UGAUGAAA | 5262 |
| 1784 | UUCAUCAG G AAAUGGAG | 2054 | CUCCAUUU GGA GCCGUUAGGC UCCCUUCAAGGA GCCGUUAGGC UCCGGG CUGAUGAA | 5263 |
| 1789 | CAGGAAAU G GAGCUGUC | 2055 | GACAGCUC GGA GCCGUUAGGC UCCCUUCAAGGA GCCGUUAGGC UCCGGG AUUUCCUG | 5264 |
| 1790 | AGGAAAUG G AGCUGUCU | 2056 | AGACAGCU GGA GCCGUUAGGC UCCCUUCAAGGA GCCGUUAGGC UCCGGG CAUUUCCU | 5265 |
| 1821 | CAGCUUGA G AGUAAGGG | 2057 | CCCUUACU GGA GCCGUUAGGC UCCCUUCAAGGA GCCGUUAGGC UCCGGG UCAAGCUG | 5266 |
| 1827 | GAGAGUAA G GGAUUAAC | 2058 | GUUAAUCC GGA GCCGUUAGGC UCCCUUCAAGGA GCCGUUAGGC UCCGGG UUACUCUC | 5267 |
| 1828 | AGAGUAAG G GAUUAACC | 2059 | GGUUAUUC GGA GCCGUUAGGC UCCCUUCAAGGA GCCGUUAGGC UCCGGG CUUACUCU | 5268 |
| 1829 | GAGUAAGG G AUUAACCC | 2060 | GGGUUAAU GGA GCCGUUAGGC UCCCUUCAAGGA GCCGUUAGGC UCCGGG CCUUACUC | 5269 |
| 1842 | ACCCUCCA G AACAGCCA | 2061 | UGGCUGUU GGA GCCGUUAGGC UCCCUUCAAGGA GCCGUUAGGC UCCGGG UGGAGGGU | 5270 |
| 1853 | CAGCCAGU G GAUGAAUG | 2062 | CAUUCAUC GGA GCCGUUAGGC UCCCUUCAAGGA GCCGUUAGGC UCCGGG ACUGGCUG | 5271 |
| 1854 | AGCCAGUG G AUGAAUGG | 2063 | CCAUUCAU GGA GCCGUUAGGC UCCCUUCAAGGA GCCGUUAGGC UCCGGG CACUGGCU | 5272 |
| 1861 | GGAUGAAU G GCACAGUG | 2064 | CACUGUGC GGA GCCGUUAGGC UCCCUUCAAGGA GCCGUUAGGC UCCGGG AUUCAUCC | 5273 |
| 1875 | GUGAUCGU G GACAGCAC | 2065 | GUGCUGUC GGA GCCGUUAGGC UCCCUUCAAGGA GCCGUUAGGC UCCGGG ACGAUCAC | 5274 |
| 1876 | UGAUCGUG G ACAGCACC | 2066 | GGUGCUGU GGA GCCGUUAGGC UCCCUUCAAGGA GCCGUUAGGC UCCGGG CACGAUCA | 5275 |
| 1887 | AGCACCGU G GGAAAGGA | 2067 | UCCUUUCC GGA GCCGUUAGGC UCCCUUCAAGGA GCCGUUAGGC UCCGGG ACGGUGCU | 5276 |
| 1888 | GCACCGUG G GAAAGGAC | 2068 | GUCCUUUC GGA GCCGUUAGGC UCCCUUCAAGGA GCCGUUAGGC UCCGGG CACGGUGC | 5277 |
| 1889 | CACCGUGG G AAAGGACA | 2069 | UGUCCUUU GGA GCCGUUAGGC UCCCUUCAAGGA GCCGUUAGGC UCCGGG CCACGGUG | 5278 |
| 1893 | GUGGGAAA G GACACUUU | 2070 | AAAGUGUC GGA GCCGUUAGGC UCCCUUCAAGGA GCCGUUAGGC UCCGGG UUUCCCAC | 5279 |
| 1894 | UGGGAAAG G ACACUUUG | 2071 | CAAAGUGU GGA GCCGUUAGGC UCCCUUCAAGGA GCCGUUAGGC UCCGGG CUUUCCCA | 5280 |
| 1916 | UAUCACCU G GACAACGC | 2072 | GCGUUGUC GGA GCCGUUAGGC UCCCUUCAAGGA GCCGUUAGGC UCCGGG AGGUGAUA | 5281 |
| 1917 | AUCACCUG G ACAACGCA | 2073 | UGCGUUGU GGA GCCGUUAGGC UCCCUUCAAGGA GCCGUUAGGC UCCGGG CAGGUGAU | 5282 |
| 1946 | CCUUCUCU G GGAUCCCA | 2074 | UGGGAUCC GGA GCCGUUAGGC UCCCUUCAAGGA GCCGUUAGGC UCCGGG AGAGAAGG | 5283 |
| 1947 | CUUCUCUG G GAUCCCAG | 2075 | CUGGGAUC GGA GCCGUUAGGC UCCCUUCAAGGA GCCGUUAGGC UCCGGG CAGAGAAG | 5284 |
| 1948 | UUCUCUGG G AUCCCAGU | 2076 | ACUGGGAU GGA GCCGUUAGGC UCCCUUCAAGGA GCCGUUAGGC UCCGGG CCAGAGAA | 5285 |
| 1957 | AUCCCAGU G GACAGAAG | 2077 | CUUCUGUC GGA GCCGUUAGGC UCCCUUCAAGGA GCCGUUAGGC UCCGGG ACUGGGAU | 5286 |
| 1958 | UCCCAGUG G ACAGAAGC | 2078 | GCUUCUGU GGA GCCGUUAGGC UCCCUUCAAGGA GCCGUUAGGC UCCGGG CACUGGGA | 5287 |
| 1962 | AGUGGACA G AAGCAAGG | 2079 | CCUUGCUU GGA GCCGUUAGGC UCCCUUCAAGGA GCCGUUAGGC UCCGGG UGUCCACU | 5288 |
| 1969 | AGAAGCAA G GUGGCUUU | 2080 | AAAGCCAC GGA GCCGUUAGGC UCCCUUCAAGGA GCCGUUAGGC UCCGGG UUGCUUCU | 5289 |
| 1972 | AGCAAGGU G GCUUUGUA | 2081 | UACAAAGC GGA GCCGUUAGGC UCCCUUCAAGGA GCCGUUAGGC UCCGGG ACCUUGCU | 5290 |
| 1983 | UUUGUAGU G GACAAAAA | 2082 | UUUUUGUC GGA GCCGUUAGGC UCCCUUCAAGGA GCCGUUAGGC UCCGGG ACUACAAA | 5291 |
| 1984 | UUGUAGUG G ACAAAAAC | 2083 | GUUUUUGU GGA GCCGUUAGGC UCCCUUCAAGGA GCCGUUAGGC UCCGGG CACUACAA | 5292 |
| 2001 | ACCAAAAU G GCCUACCU | 2084 | AGGUAGGC GGA GCCGUUAGGC UCCCUUCAAGGA GCCGUUAGGC UCCGGG AUUUUGGU | 5293 |
| 2020 | AAAUCCCA G GCAUUGCU | 2085 | AGCAAUGC GGA GCCGUUAGGC UCCCUUCAAGGA GCCGUUAGGC UCCGGG UGGGAUUU | 5294 |
| 2031 | AUUGCUAA G GUUGGCAC | 2086 | GUGCCAAC GGA GCCGUUAGGC UCCCUUCAAGGA GCCGUUAGGC UCCGGG UUAGCAAU | 5295 |
| 2035 | CUAAGGUU G GCACUUGG | 2087 | CCAAGUGC GGA GCCGUUAGGC UCCCUUCAAGGA GCCGUUAGGC UCCGGG AACCUUAG | 5296 |
| 2042 | UGGCACUU G GAAAUACA | 2088 | UGUAUUUC GGA GCCGUUAGGC UCCCUUCAAGGA GCCGUUAGGC UCCGGG AAGUGCCA | 5297 |
| 2043 | GGCACUUG G AAAUACAG | 2089 | CUGUAUUU GGA GCCGUUAGGC UCCCUUCAAGGA GCCGUUAGGC UCCGGG CAAGUGCC | 5298 |
| 2148 | ACGAACAA G GACACCAG | 2090 | CUGGUGUC GGA GCCGUUAGGC UCCCUUCAAGGA GCCGUUAGGC UCCGGG UUGUUCGU | 5299 |
| 2149 | CGAACAAG G ACACCAGC | 2091 | GCUGGUGU GGA GCCGUUAGGC UCCCUUCAAGGA GCCGUUAGGC UCCGGG CUUGUUCG | 5300 |
| 2175 | AGCCCUCU G GUAGUUUA | 2092 | UAAACUAC GGA GCCGUUAGGC UCCCUUCAAGGA GCCGUUAGGC UCCGGG AGAGGGCU | 5301 |
| 2200 | UUCGCCAA G GAGCCUCC | 2093 | GGAGGCUC GGA GCCGUUAGGC UCCCUUCAAGGA GCCGUUAGGC UCCGGG UUGGCGAA | 5302 |
| 2201 | UCGCCAAG G AGCCUCCC | 2094 | GGGAGGCU GGA GCCGUUAGGC UCCCUUCAAGGA GCCGUUAGGC UCCGGG CUUGGCGA | 5303 |
| 2219 | AAUUCUCA G GGCCAGUG | 2095 | CACUGGCC GGA GCCGUUAGGC UCCCUUCAAGGA GCCGUUAGGC UCCGGG UGAGAAUU | 5304 |
| 2220 | AUUCUCAG G GCCAGUGU | 2096 | ACACUGGC GGA GCCGUUAGGC UCCCUUCAAGGA GCCGUUAGGC UCCGGG CUGAGAAU | 5305 |
| 2254 | CAGUGAAU G GAAAAACA | 2097 | UGUUUUUC GGA GCCGUUAGGC UCCCUUCAAGGA GCCGUUAGGC UCCGGG AUUCACUG | 5306 |
| 2255 | AGUGAAUG G AAAAACAG | 2098 | CUGUUUUU GGA GCCGUUAGGC UCCCUUCAAGGA GCCGUUAGGC UCCGGG CAUUCACU | 5307 |
| 2271 | GUUACCUU G GAACUACU | 2099 | AGUAGUUC GGA GCCGUUAGGC UCCCUUCAAGGA GCCGUUAGGC UCCGGG AAGGUAAC | 5308 |
| 2272 | UUACCUUG G AACUACUG | 2100 | CAGUAGUU GGA GCCGUUAGGC UCCCUUCAAGGA GCCGUUAGGC UCCGGG CAAGGUAA | 5309 |
| 2280 | GAACUACU G GAUAAUGG | 2101 | CCAUUAUC GGA GCCGUUAGGC UCCCUUCAAGGA GCCGUUAGGC UCCGGG AGUAGUUC | 5310 |
| 2281 | AACUACUG G AUAAUGGA | 2102 | UCCAUUAU GGA GCCGUUAGGC UCCCUUCAAGGA GCCGUUAGGC UCCGGG CAGUAGUU | 5311 |
| 2287 | UGGAUAAU G GAGCAGGU | 2103 | ACCUGCUC GGA GCCGUUAGGC UCCCUUCAAGGA GCCGUUAGGC UCCGGG AUUAUCCA | 5312 |
| 2288 | GGAUAAUG G AGCAGGUG | 2104 | CACCUGCU GGA GCCGUUAGGC UCCCUUCAAGGA GCCGUUAGGC UCCGGG CAUUAUCC | 5313 |
| 2293 | AUGGAGCA G GUGCUGAU | 2105 | AUCAGCAC GGA GCCGUUAGGC UCCCUUCAAGGA GCCGUUAGGC UCCGGG UGCUCCAU | 5314 |
| 2310 | GCUACUAA G GAUGACGG | 2106 | CCGUCAUC GGA GCCGUUAGGC UCCCUUCAAGGA GCCGUUAGGC UCCGGG UUAGUAGC | 5315 |
| 2311 | CUACUAAG G AUGACGGU | 2107 | ACCGUCAU GGA GCCGUUAGGC UCCCUUCAAGGA GCCGUUAGGC UCCGGG CUUAGUAG | 5316 |
| 2317 | AGGAUGAC G GUGUCUAC | 2108 | GUAGACAC GGA GCCGUUAGGC UCCCUUCAAGGA GCCGUUAGGC UCCGGG GUCAUCCU | 5317 |
| 2330 | CUACUCAA G GUAUUUCA | 2109 | UGAAAUAC GGA GCCGUUAGGC UCCCUUCAAGGA GCCGUUAGGC UCCGGG UUGAGUAG | 5318 |
| 2356 | ACACGAAU G GUAGAUAC | 2110 | GUAUCUAC GGA GCCGUUAGGC UCCCUUCAAGGA GCCGUUAGGC UCCGGG AUUCGUGU | 5319 |
| 2360 | GAAUGGUA G AUACAGUG | 2111 | CACUGUAU GGA GCCGUUAGGC UCCCUUCAAGGA GCCGUUAGGC UCCGGG UACCAUUC | 5320 |
| 2378 | AAAAGUGC G GGCUCUGG | 2112 | CCAGAGCC GGA GCCGUUAGGC UCCCUUCAAGGA GCCGUUAGGC UCCGGG GCACUUUU | 5321 |
| 2379 | AAAGUGCG G GCUCUGGG | 2113 | CCCAGAGC GGA GCCGUUAGGC UCCCUUCAAGGA GCCGUUAGGC UCCGGG CGCACUUU | 5322 |
| 2385 | CGGGCUCU G GGAGGAGU | 2114 | ACUCCUCC GGA GCCGUUAGGC UCCCUUCAAGGA GCCGUUAGGC UCCGGG AGAGCCCG | 5323 |
| 2386 | GGGCUCUG G GAGGAGUU | 2115 | AACUCCUC GGA GCCGUUAGGC UCCCUUCAAGGA GCCGUUAGGC UCCGGG CAGAGCCC | 5324 |
| 2387 | GGCUCUGG G AGGAGUUA | 2116 | UAACUCCU GGA GCCGUUAGGC UCCCUUCAAGGA GCCGUUAGGC UCCGGG CCAGAGCC | 5325 |
| 2389 | CUCUGGGA G GAGUUAAC | 2117 | GUUAACUC GGA GCCGUUAGGC UCCCUUCAAGGA GCCGUUAGGC UCCGGG UCCCAGAG | 5326 |
| 2390 | UCUGGGAG G AGUUAACG | 2118 | CGUUAACU GGA GCCGUUAGGC UCCCUUCAAGGA GCCGUUAGGC UCCGGG CUCCCAGA | 5327 |
| 2405 | CGCAGCCA G ACGGAGAG | 2119 | CUCUCCGU GGA GCCGUUAGGC UCCCUUCAAGGA GCCGUUAGGC UCCGGG UGGCUGCG | 5328 |
| 2408 | AGCCAGAC G GAGAGUGA | 2120 | UCACUCUC GGA GCCGUUAGGC UCCCUUCAAGGA GCCGUUAGGC UCCGGG GUCUGGCU | 5329 |
| 2409 | GCCAGACG G AGAGUGAU | 2121 | AUCACUCU GGA GCCGUUAGGC UCCCUUCAAGGA GCCGUUAGGC UCCGGG CGUCUGGC | 5330 |
| 2411 | CAGACGGA G AGUGAUAC | 2122 | GUAUCACU GGA GCCGUUAGGC UCCCUUCAAGGA GCCGUUAGGC UCCGGG UCCGUCUG | 5331 |
| 2427 | CCCCAGCA G AGUGGAGC | 2123 | GCUCCACU GGA GCCGUUAGGC UCCCUUCAAGGA GCCGUUAGGC UCCGGG UGCUGGGG | 5332 |
| 2431 | AGCAGAGU G GAGCACUG | 2124 | CAGUGCUC GGA GCCGUUAGGC UCCCUUCAAGGA GCCGUUAGGC UCCGGG ACUCUGCU | 5333 |
| 2432 | GCAGAGUG G AGCACUGU | 2125 | ACAGUGCU GGA GCCGUUAGGC UCCCUUCAAGGA GCCGUUAGGC UCCGGG CACUCUGC | 5334 |
| 2449 | ACAUACCU G GCUGGAUU | 2126 | AAUCCAGC GGA GCCGUUAGGC UCCCUUCAAGGA GCCGUUAGGC UCCGGG AGGUAUGU | 5335 |
| 2453 | ACCUGGCU G GAUUGAGA | 2127 | UCUCAAUC GGA GCCGUUAGGC UCCCUUCAAGGA GCCGUUAGGC UCCGGG AGCCAGGU | 5336 |
| 2454 | CCUGGCUG G AUUGAGAA | 2128 | UUCUCAUU GGA GCCGUUAGGC UCCCUUCAAGGA GCCGUUAGGC UCCGGG CAGCCAGG | 5337 |
| 2460 | UGGAUUGA G AAUGAUGA | 2129 | UCAUCAUU GGA GCCGUUAGGC UCCCUUCAAGGA GCCGUUAGGC UCCGGG UCAAUCCA | 5338 |
| 2477 | AAUACAAU G GAAUCCAC | 2130 | GUGGAUUC GGA GCCGUUAGGC UCCCUUCAAGGA GCCGUUAGGC UCCGGG AUUGUAUU | 5339 |
| 2478 | AUACAAUG G AAUCCACC | 2131 | GGUGGAUU GGA GCCGUUAGGC UCCCUUCAAGGA GCCGUUAGGC UCCGGG CAUUGUAU | 5340 |
| 2489 | UCCACCAA G ACCUGAAA | 2132 | UUUCAGGU GGA GCCGUUAGGC UCCCUUCAAGGA GCCGUUAGGC UCCGGG UUGGUGGA | 5341 |
| 2505 | AUUAAUAA G GAUGAUGU | 2133 | ACAUCAUC GGA GCCGUUAGGC UCCCUUCAAGGA GCCGUUAGGC UCCGGG UUAUUAAU | 5342 |
| 2506 | UUAAUAAG G AUGAUGUU | 2134 | AACAUCAU GGA GCCGUUAGGC UCCCUUCAAGGA GCCGUUAGGC UCCGGG CUUAUUAA | 5343 |
| 2540 | UUUCAGCA G AACAUCCU | 2135 | AGGAUGUU GGA GCCGUUAGGC UCCCUUCAAGGA GCCGUUAGGC UCCGGG UGCUGAAA | 5344 |
| 2550 | ACAUCCUC G GGAGGCUC | 2136 | GAGCCUCC GGA GCCGUUAGGC UCCCUUCAAGGA GCCGUUAGGC UCCGGG GAGGAUGU | 5345 |
| 2551 | CAUCCUCG G GAGGCUCA | 2137 | UGAGCCUC GGA GCCGUUAGGC UCCCUUCAAGGA GCCGUUAGGC UCCGGG CGAGGAUG | 5346 |
| 2552 | AUCCUCGG G AGGCUCAU | 2138 | AUGAGCCU GGA GCCGUUAGGC UCCCUUCAAGGA GCCGUUAGGC UCCGGG CCGAGGAU | 5347 |
| 2554 | CCUCGGGA G GCUCAUUU | 2139 | AAAUGAGC GGA GCCGUUAGGC UCCCUUCAAGGA GCCGUUAGGC UCCGGG UCCCGAGG | 5348 |
| 2565 | UCAUUUGU G GCUUCUGA | 2140 | UCAGAAGC GGA GCCGUUAGGC UCCCUUCAAGGA GCCGUUAGGC UCCGGG ACAAAUGA | 5349 |
| 2611 | UCCCACCU G GCCAAAUC | 2141 | GAUUUGGC GGA GCCGUUAGGC UCCCUUCAAGGA GCCGUUAGGC UCCGGG AGGUGGGA | 5350 |
| 2631 | GACCUGAA G GCGGAAAU | 2142 | AUUUCCGC GGA GCCGUUAGGC UCCCUUCAAGGA GCCGUUAGGC UCCGGG UUCAGGUC | 5351 |
| 2634 | CUGAAGGC G GAAAUUCA | 2143 | UGAAUUUC GGA GCCGUUAGGC UCCCUUCAAGGA GCCGUUAGGC UCCGGG GCCUUCAG | 5352 |
| 2635 | UGAAGGCG G AAAUUCAC | 2144 | GUGAAUUU GGA GCCGUUAGGC UCCCUUCAAGGA GCCGUUAGGC UCCGGG CGCCUUCA | 5353 |
| 2644 | AAAUUCAC G GGGGCAGU | 2145 | ACUGCCCC GGA GCCGUUAGGC UCCCUUCAAGGA GCCGUUAGGC UCCGGG GUGAAUUU | 5354 |
| 2645 | AAUUCACG G GGGCAGUC | 2146 | GACUGCCC GGA GCCGUUAGGC UCCCUUCAAGGA GCCGUUAGGC UCCGGG CGUGAAUU | 5355 |
| 2646 | AUUCACGG G GGCAGUCU | 2147 | AGACUGCC GGA GCCGUUAGGC UCCCUUCAAGGA GCCGUUAGGC UCCGGG CCGUGAAU | 5356 |
| 2647 | UUCACGGG G GCAGUCUC | 2148 | GAGACUGC GGA GCCGUUAGGC UCCCUUCAAGGA GCCGUUAGGC UCCGGG CCCGUGAA | 5357 |
| 2669 | UCUGACUU G GACAGCUC | 2149 | GAGCUGUC GGA GCCGUUAGGC UCCCUUCAAGGA GCCGUUAGGC UCCGGG AAGUCAGA | 5358 |
| 2670 | CUGACUUG G ACAGCUCC | 2150 | GGAGCUGU GGA GCCGUUAGGC UCCCUUCAAGGA GCCGUUAGGC UCCGGG CAAGUCAG | 5359 |
| 2680 | CAGCUCCU G GGGAUGAU | 2151 | AUCAUCCC GGA GCCGUUAGGC UCCCUUCAAGGA GCCGUUAGGC UCCGGG AGGAGCUG | 5360 |
| 2681 | AGCUCCUG G GGAUGAUU | 2152 | AAUCAUCC GGA GCCGUUAGGC UCCCUUCAAGGA GCCGUUAGGC UCCGGG CAGGAGCU | 5361 |
| 2682 | GCUCCUGG G GAUGAUUA | 2153 | UAAUCAUC GGA GCCGUUAGGC UCCCUUCAAGGA GCCGUUAGGC UCCGGG CCAGGAGC | 5362 |
| 2683 | CUCCUGGG G AUGAUUAU | 2154 | AUAAUCAU GGA GCCGUUAGGC UCCCUUCAAGGA GCCGUUAGGC UCCGGG CCCAGGAG | 5363 |
| 2698 | AUGACCAU G GAACAGCU | 2155 | AGCUGUUC GGA GCCGUUAGGC UCCCUUCAAGGA GCCGUUAGGC UCCGGG AUGGUCAU | 5364 |
| 2699 | UGACCAUG G AACAGCUC | 2156 | GAGCUGUU GGA GCCGUUAGGC UCCCUUCAAGGA GCCGUUAGGC UCCGGG CAUGGUCA | 5365 |
| 2750 | UGAUCUCA G AGACAAGU | 2157 | ACUUGUCU GGA GCCGUUAGGC UCCCUUCAAGGA GCCGUUAGGC UCCGGG UGAGAUCA | 5366 |
| 2752 | AUCUCAGA G ACAAGUUC | 2158 | GAACUUGU GGA GCCGUUAGGC UCCCUUCAAGGA GCCGUUAGGC UCCGGG UCUGAGAU | 5367 |
| 2802 | AUCCCAAA G GAAGCCAA | 2159 | UUGGCUUC GGA GCCGUUAGGC UCCCUUCAAGGA GCCGUUAGGC UCCGGG UUUGGGAU | 5368 |
| 2803 | UCCCAAAG G AAGCCAAC | 2160 | GUUGGCUU GGA GCCGUUAGGC UCCCUUCAAGGA GCCGUUAGGC UCCGGG CUUUGGGA | 5369 |
| 2817 | AACUCUGA G GAAGUCUU | 2161 | AAGACUUC GGA GCCGUUAGGC UCCCUUCAAGGA GCCGUUAGGC UCCGGG UCAGAGUU | 5370 |
| 2818 | ACUCUGAG G AAGUCUUU | 2162 | AAAGACUU GGA GCCGUUAGGC UCCCUUCAAGGA GCCGUUAGGC UCCGGG CUCAGAGU | 5371 |
| 2839 | UUAAACCA G AAAACAUU | 2163 | AAUGUUUU GGA GCCGUUAGGC UCCCUUCAAGGA GCCGUUAGGC UCCGGG UGGUUUAA | 5372 |
| 2860 | UUGAAAAU G GCACAGAU | 2164 | AUCUGUGC GGA GCCGUUAGGC UCCCUUCAAGGA GCCGUUAGGC UCCGGG AUUUUCAA | 5373 |
| 2866 | AUGGCACA G AUCUUUUC | 2165 | GAAAAGAU GGA GCCGUUAGGC UCCCUUCAAGGA GCCGUUAGGC UCCGGG UGUGCCAU | 5374 |
| 2886 | GCUAUUCA G GCUGUUGA | 2166 | UCAACAGC GGA GCCGUUAGGC UCCCUUCAAGGA GCCGUUAGGC UCCGGG UGAAUAGC | 5375 |
| 2898 | GUUGAUAA G GUCGAUCU | 2167 | AGAUCGAC GGA GCCGUUAGGC UCCCUUCAAGGA GCCGUUAGGC UCCGGG UUAUCAAC | 5376 |
| 2914 | UGAAAUCA G AAAUAUCC | 2168 | GGAUAUUU GGA GCCGUUAGGC UCCCUUCAAGGA GCCGUUAGGC UCCGGG UGAUUUCA | 5377 |
| 2958 | CCUCCACA G ACUCCGCC | 2169 | GGCGGAGU GGA GCCGUUAGGC UCCCUUCAAGGA GCCGUUAGGC UCCGGG UGUGGAGG | 5378 |
| 2968 | CUCCGCCA G AGACACCU | 2170 | AGGUGUCU GGA GCCGUUAGGC UCCCUUCAAGGA GCCGUUAGGC UCCGGG UGGCGGAG | 5379 |
| 2970 | CCGCCAGA G ACACCUAG | 2171 | CUAGGUGU GGA GCCGUUAGGC UCCCUUCAAGGA GCCGUUAGGC UCCGGG UCUGGCGG | 5380 |
| 3034 | CCAUUCCU G GCAUUCAC | 2172 | GUGAAUGC GGA GCCGUUAGGC UCCCUUCAAGGA GCCGUUAGGC UCCGGG AGGAAUGG | 5381 |
| 3059 | AAUUAUGU G GAAGUGGA | 2173 | UCCACUUC GGA GCCGUUAGGC UCCCUUCAAGGA GCCGUUAGGC UCCGGG ACAUAAUU | 5382 |
| 3060 | AUUAUGUG G AAGUGGAU | 2174 | AUCCACUU GGA GCCGUUAGGC UCCCUUCAAGGA GCCGUUAGGC UCCGGG CACAUAAU | 5383 |
| 3065 | GUGGAAGU G GAUAGGAG | 2175 | CUCCUAUC GGA GCCGUUAGGC UCCCUUCAAGGA GCCGUUAGGC UCCGGG ACUUCCAC | 5384 |
| 3066 | UGGAAGUG G AUAGGAGA | 2176 | UCUCCUAU GGA GCCGUUAGGC UCCCUUCAAGGA GCCGUUAGGC UCCGGG CACUUCCA | 5385 |
| 3070 | AGUGGAUA G GAGAACUG | 2177 | CAGUUCUC GGA GCCGUUAGGC UCCCUUCAAGGA GCCGUUAGGC UCCGGG UAUCCACU | 5386 |
| 3071 | GUGGAUAG G AGAACUGC | 2178 | GCAGUUCU GGA GCCGUUAGGC UCCCUUCAAGGA GCCGUUAGGC UCCGGG CUAUCCAC | 5387 |
| 3073 | GGAUAGGA G AACUGCAG | 2179 | CUGCAGUU GGA GCCGUUAGGC UCCCUUCAAGGA GCCGUUAGGC UCCGGG UCCUAUCC | 5388 |
| 3096 | AUAGCCUA G GGCUGAAU | 2180 | AUUCAGCC GGA GCCGUUAGGC UCCCUUCAAGGA GCCGUUAGGC UCCGGG UAGGCUAU | 5389 |
| 3097 | UAGCCUAG G GCUGAAUU | 2181 | AAUUCAGC GGA GCCGUUAGGC UCCCUUCAAGGA GCCGUUAGGC UCCGGG CUAGGCUA | 5390 |
| 3113 | UUUUGUCA G AUAAAUAA | 2182 | UUAUUUAU GGA GCCGUUAGGC UCCCUUCAAGGA GCCGUUAGGC UCCGGG UGACAAAA | 5391 |
| 3174 | GUAUUUUA G ACUUCCUG | 2183 | CAGGAAGU GGA GCCGUUAGGC UCCCUUCAAGGA GCCGUUAGGC UCCGGG UAAAAUAC | 5392 |
| 3264 | GUAUUUUA G ACUUCCUG | 2183 | CAGGAAGU GGA GCCGUUAGGC UCCCUUCAAGGA GCCGUUAGGC UCCGGG UAAAAUAC | 5392 |
| 3185 | UUCCUGUA G GGGGCGAU | 2184 | AUCGCCCC GGA GCCGUUAGGC UCCCUUCAAGGA GCCGUUAGGC UCCGGG UACAGGAA | 5393 |
| 3238 | UUCCUGUA G GGGGCGAU | 2184 | AUCGCCCC GGA GCCGUUAGGC UCCCUUCAAGGA GCCGUUAGGC UCCGGG UACAGGAA | 5393 |
| 3275 | UUCCUGUA G GGGGCGAU | 2184 | AUCGCCCC GGA GCCGUUAGGC UCCCUUCAAGGA GCCGUUAGGC UCCGGG UACAGGAA | 5393 |
| 3186 | UCCUGUAG G GGGCGAUA | 2185 | UAUCGCCC GGA GCCGUUAGGC UCCCUUCAAGGA GCCGUUAGGC UCCGGG CUACAGGA | 5394 |
| 3239 | UCCUGUAG G GGGCGAUA | 2185 | UAUCGCCC GGA GCCGUUAGGC UCCCUUCAAGGA GCCGUUAGGC UCCGGG CUACAGGA | 5394 |
| 3276 | UCCUGUAG G GGGCGAUA | 2185 | UAUCGCCC GGA GCCGUUAGGC UCCCUUCAAGGA GCCGUUAGGC UCCGGG CUACAGGA | 5394 |
| 3187 | CCUGUAGG G GGCGAUAU | 2186 | AUAUCGCC GGA GCCGUUAGGC UCCCUUCAAGGA GCCGUUAGGC UCCGGG CCUACAGG | 5395 |
| 3240 | CCUGUAGG G GGCGAUAU | 2186 | AUAUCGCC GGA GCCGUUAGGC UCCCUUCAAGGA GCCGUUAGGC UCCGGG CCUACAGG | 5395 |
| 3188 | CUGUAGGG G GCGAUAUA | 2187 | UAUAUCGC GGA GCCGUUAGGC UCCCUUCAAGGA GCCGUUAGGC UCCGGG CCCUACAG | 5396 |
| 3241 | CUGUAGGG G GCGAUAUA | 2187 | UAUAUCGC GGA GCCGUUAGGC UCCCUUCAAGGA GCCGUUAGGC UCCGGG CCCUACAG | 5396 |
| 3277 | CCUGUAGG G GGCGAUAA | 2188 | UUAUCGCC GGA GCCGUUAGGC UCCCUUCAAGGA GCCGUUAGGC UCCGGG CCUACAGG | 5397 |
| 3278 | CUGUAGGG G GCGAUAAA | 2189 | UUUAUCGC GGA GCCGUUAGGC UCCCUUCAAGGA GCCGUUAGGC UCCGGG CCCUACAG | 5398 |

Input Sequence = NM_001285. Cut Site = G/.
Arm Length = 8. Core Sequence = GGAGGAAACUCC CU UCAAGGACAUCGUCCGGG
Underlined region can be any X sequence or linker, as described herein.
NM_001285 (Homo sapiens chloride channel, calcium activated, 1 (CLCA1) mRNA, 3311 bp)

[0196] TABLE IX
Human CLCA1 GeneBloc and Target Sequence 249.021

| | | Substrate | | | | Rz |
|---|---|---|---|---|---|---|
| Pos | Substrate | Seq ID No. | RPI# | Alias | GeneBloc | Seq ID No. |
| 821 | CAAGGUAAGGCAUUUGUCCAUGA | 5399 | 19843 | hCLCA1:821L23 GB3.3 | B ucauggaCSASASASTSGSCSCSTSuaccuug B | 5417 |
| 1141 | CAAAGAAGCUCCAAACAAGCAAA | 5400 | 19837 | hCLCA1:1141L23 GB3.3 | B uuugcuuGSTSTSTSGSGSASGSCSuucuuug B | 5418 |
| 1646 | GUCAAACAAAGUGGUGCCAUCAU | 5401 | 19841 | hCLCA1:1646L23 GB3.3 | B augauggCSASCSCSASCSTSTSTSguuugac B | 5419 |
| 2464 | CAUACCUGGCUGGAUUGAGAAUG | 5402 | 19836 | hCLCA1:2464L23 GB3.3 | B cauucucASASTSCSCSASGSCSCSagguaug B | 5420 |
| 2542 | CAAGCAAGUGUGUUUCAGCAGAA | 5403 | 19839 | hCLCA1:2542L23 GB3.3 | B uucugcuGSASASASCSASCSASCSuugcuug B | 5421 |
| 2577 | GCUCAUUUGUGGCUUCUGAUGUC | 5404 | 19840 | hCLCA1:2577L23 GB3.3 | B gacaucaGSASASGSCSCSASCSASaaugagc B | 5422 |
| 2711 | UAUGACCAUGGAACAGCUCACAA | 5405 | 19842 | hCLCA1:2711L23 GB3.3 | B uugugagCSTSGSTSTSCSCSASTSggucaua B | 5423 |
| 3087 | GGAUAGGAGAACUGCAGCUGUCA | 5406 | 19838 | hCLCA1:3087L23 GB3.3 | B ugacagcTSGSCSASGSTSTSCSTSccuaucc B | 5424 |
| 69 | TCTTGATTCTTCACC | 5407 | 20960 | hCLCA1-69 Rz-7 allyl | gSgSuSgSaag cUGAuGaggccguuaggccGaa Aucaaga B | 5425 |
| | | | | stab1e | | |
| 70 | CTTGATTCTTCACCT | 5408 | 20961 | hCLCA1-70 Rz-7 allyl | aSgSgSuSgaa cUGAuGaggccguuaggccGaa Aaucaag B | 5426 |
| | | | | stab1e | | |
| 71 | TTGATTCTTCACCTT | 5409 | 20968 | hCLCA1-71 CHz-7 allyl | aSaSgSgSuga cUGAuGaggccguuaggccGaa Iaaucaa B | 5427 |
| | | | | stab1e | | |
| 72 | TGATTCTTCACCTTC | 5410 | 20962 | hCLCA1-72 Rz-7 allyl | gSaSaSgSgug cUGAuGaggccguuaggccGaa Agaauca B | 5428 |
| | | | | stab1e | | |
| 73 | GATTCTTCACCTTCT | 5411 | 20963 | hCLCA1-73 Rz-7 allyl | aSgSaSaSggu cUGAuGaggccguuaggccGaa Aagaauc B | 5429 |
| | | | | stab1e | | |
| 445 | TCCTGATTTCATTGC | 5412 | 20964 | hCLCA1-445 Rz-7 allyl | gScSaSaSuga cUGAuGaggccguuaggccGaa Aucagga B | 5430 |
| | | | | stab1e | | |
| 446 | CCTGATTTCATTGCA | 5413 | 20965 | hCLCA1-446 Rz-7 allyl | uSgScSaSaug cUGAuGaggccguuaggccGaa Aaucagg B | 5431 |
| | | | | stab1e | | |
| 447 | CTGATTTCATTGCAG | 5414 | 20966 | hCLCA1-447 Rz-7 allyl | cSuSgScSaau cUGAuGaggccguuaggccGaa Aaaucag B | 5432 |
| | | | | stab1e | | |
| 448 | TGATTTCATTGCAGG | 5415 | 20969 | hCLCA1-448 CHz7 | cScSuSgScaa cUGAuGaggccguuaggccGaa Iaaauca B | 5433 |
| | | | | allyl staB1e | | |
| 450 | ATTTCATTGCAGGAA | 5416 | 20967 | hCLCA1-450 Rz-7 allyl | uSuScScSugc cUGAuGaggccguuaggccGaa Augaaau B | 5434 |
| | | | | stab1e | | |

lower case = 2′OMe; A = riBo A
Upper Case = DeoxyriBose (DNA)
s = phosphorothioate linkages
B = inverted aBasic
U = 2′-C-allyl Uridine
G = riBo G

[0197] TABLE X
PCR Primers 249.021

| PCR primer | Seq ID No |
|---|---|
| CGAAATCTCGAGCAGACTTGTGGGAGAAGCTC | 5435 |
| AGCACACTGCAGAGTTGCTGGCCAGCTTACCTCC | 5436 |

What is claimed is:

1. A nucleic acid molecule that down regulates expression of CLCA1 (Chloride Channel Calcium Activated) gene.

2. The nucleic acid molecule of claim 1, wherein said nucleic acid molecule is used to treat conditions selected from the group consisting of Chronic Obstructive Pulmonary Disease (COPD), chronic bronchitis, asthma, cystic fibrosis, and obstructive bowel syndrome.

3. The nucleic acid molecule of claim 1, wherein said nucleic acid molecule is an enzymatic nucleic acid molecule.

4. The nucleic acid molecule of claim 3, wherein a binding arm of said enzymatic nucleic acid molecule comprise sequences complementary to any of sequences having SEQ ID NOs:1-2189 and 5399-5416.

5. The nucleic acid molecule of claim 3, wherein said enzymatic nucleic acid molecule comprises any of sequences having SEQ ID NOs:2190-5398 and 5425-5434.

6. The nucleic acid molecule of claim 1, wherein said nucleic acid molecule is an antisense nucleic acid molecule.

7. The nucleic acid molecule of claim 6, wherein said antisense nucleic acid molecule comprises sequences complementary to any of sequences having SEQ ID NOs:1-2189 and 5399-5416.

8. The nucleic acid molecule of claim 6, wherein said antisense nucleic acid molecule comprise any of sequences having SEQ ID NOs:5417-5424.

9. The nucleic acid molecule of claim 3, wherein said enzymatic nucleic acid molecule is in a hammerhead (HH) motif.

10. The nucleic acid molecule of claim 3, wherein said enzymatic nucleic acid molecule is in a hairpin, hepatitis Delta virus, group I intron, VS nucleic acid, amberzyme, zinzyme or RNAse P nucleic acid motif.

11. The nucleic acid molecule of claim 3, wherein said enzymatic nucleic acid molecule is in an Inozyme motif.

12. The nucleic acid molecule of claim 3, wherein said enzymatic nucleic acid molecule is in a G-cleaver motif.

13. The nucleic acid molecule of claim 3, wherein said enzymatic nucleic acid molecule is a DNAzyme.

14. The nucleic acid molecule of claims 3 or 6, wherein said nucleic acid molecule comprises between 12 and 100 bases complementary to RNA of a CLCA1 gene.

15. The nucleic acid molecule of claims 3 or 6, wherein said nucleic acid molecule comprises between 14 and 24 bases complementary to RNA of a CLCA1 gene.

16. The nucleic acid molecule of claim 1, wherein said nucleic acid molecule is chemically synthesized.

17. The nucleic acid molecule of claim 1, wherein said nucleic acid molecule comprises at least one 2′-sugar modification.

18. The nucleic acid molecule of claim 1, wherein said nucleic acid molecule comprises at least one nucleic acid base modification.

19. The nucleic acid molecule of claim 1, wherein said nucleic acid molecule comprises at least one phosphate backbone modification.

20. A mammalian cell comprising the nucleic acid molecule of claim 1.

21. The mammalian cell of claim 20, wherein said mammalian cell is a human cell.

22. A method of reducing CLCA1 activity in a cell, comprising the step of contacting said cell with the nucleic acid molecule of claim 1, under conditions suitable for said reduction of CLCA1 activity.

23. A method of treatment of a patient having a condition associated with the level of CLCA1, comprising contacting cells of said patient with the nucleic acid molecule of claim 1, under conditions suitable for said treatment.

24. The method of claim 23 further comprising the use of one or more therapies under conditions suitable for said treatment.

25. A method of cleaving RNA of a CLCA1 gene, comprising contacting the nucleic acid molecule of claim 3 with said RNA under conditions suitable for the cleavage of said RNA.

26. The method of claim 25, wherein said cleavage is carried out in the presence of a divalent cation.

27. The method of claim 26, wherein said divalent cation is Mg²⁺.

28. The nucleic acid molecule of claim 1, wherein said nucleic acid comprises a cap structure, wherein the cap structure is at the 5′-end or 3′-end or both the 5′-end and the 3′-end.

29. The enzymatic nucleic acid molecule of claim 9, wherein said hammerhead motif comprises sequences complementary to any of sequences having SEQ ID NOs: 1-575.

30. The enzymatic nucleic acid molecule of claim 11, wherein said Inozyme motif comprises sequences complementary to any of sequences having SEQ ID NOs:576-1210.

31. The enzymatic nucleic acid molecule of claim 12, wherein said G-cleaver motif comprises sequences complementary to any of sequences having SEQ ID NOs:1211-1429.

32. The enzymatic nucleic acid molecule of claim 13, wherein said DNAzyme comprises sequences complementary to any sequence shown as substrate sequences in Table VII.

33. The enzymatic nucleic acid molecule of claim 10, wherein said zinzyme comprises sequences complementary to any sequence shown as substrate sequences in Table VI.

34. The enzymatic nucleic acid molecule of claim 10, wherein said amberzyme comprises sequences complementary to any sequence shown as substrate sequences in Table VIU.

35. An expression vector comprising at least one nucleic acid molecule of claim 1, in a manner that allows expression of the nucleic acid molecule.

36. A mammalian cell comprising an expression vector of claim 35.

37. The mammalian cell of claim 36, wherein said mammalian cell is a human cell.

38. The expression vector of claim 35, wherein said nucleic acid molecule is an enzymatic nucleic acid molecule.

39. The expression vector of claim 35, wherein said expression vector further comprises an antisense nucleic acid molecule complementary to RNA of a CLCA1 gene.

40. The expression vector of claim 35, wherein said expression vector comprises at least two said nucleic acid molecules.

41. The expression vector of claim 40, wherein the at least two nucleic acid molecules are the same.

42. The expression vector of claim 40, wherein the at least two nucleic acid molecules are different.

43. The expression vector of claim 40, wherein one said expression vector further comprises an antisense nucleic acid molecule complementary to RNA of a CLCA1 gene.

44. The expression vector of claim 40, wherein one said expression vector further comprises an enzymatic nucleic acid molecule complementary to RNA of a CLCA1 gene.

45. A method for treatment of chronic obstructive pulmonary disease comprising the step of administering to a patient the nucleic acid molecule of claim 1 under conditions suitable for said treatment.

46. A method for treatment of cystic fibrosis comprising the step of administering to a patient the nucleic acid molecule of claim 1 under conditions suitable for said treatment.

47. An enzymatic nucleic acid molecule that cleaves RNA derived from a CLCA1 gene.

48. The enzymatic nucleic acid molecule of claim 47, wherein said enzymatic nucleic acid molecule is selected from the group consisting of Hammerhead, Hairpin, Inozyme, G-cleaver, DNAzyme, Amberzyme and Zinzyme.

49. The method of claims 45 or 46, wherein said method further comprises administering to said patient the nucleic acid molecule of claim 1 in conjunction with one or more other therapies.

50. The method of claim 49, wherein said other therapies are therapies selected from the group consisting of oxygen therapy, bronchodilators, corticosteroids, antibacterials, vaccinations, acetylcysteine, mucokinetic agents, and DNase (Pulmozyme) treatments.

51. The nucleic acid molecule of claim 9, wherein said nucleic acid molecule comprises at least five ribose residues, at least ten 2′-O-methyl modifications, and a 3′-end modification.

52. The nucleic acid molecule of claim 51, wherein said nucleic acid molecule further comprises a phosphorothioate core with both 3′ and 5′ -end modifications.

53. The nucleic acid molecule of claims 51 or 52, wherein said 3′ and/or 5′-end modification is 3′-3′ inverted abasic moiety.

54. The nucleic acid molecule of claim 3, wherein said nucleic acid molecule comprises at least five ribose residues; at least ten 2′-O-methyl modifications, and a 3′-end modification.

55. The nucleic acid molecule of claim 54, wherein said nucleic acid molecule further comprises phosphorothioate linkages on at least three of the 5′ terminal nucleotides.

56. The nucleic acid molecule of claim 54, wherein said 3′-end modification is 3′-3′ inverted abasic moiety.

57. The enzymatic nucleic acid molecule of claim 13, wherein said DNAzyme comprises at least ten 2′-O-methyl modifications.

58. The enzymatic nucleic acid molecule of claim 57, wherein said DNAzyme further comprises phosphorothioate linkages on at least three of the 5′ terminal nucleotides.

59. The enzymatic nucleic acid molecule of claim 57, wherein said DNAzyme further comprises a 3′-end modification.

60. The enzymatic nucleic acid molecule of claim 59, wherein said 3′-end modification is 3′-3′ inverted abasic moiety.

The application's sequence listing, which the Patent Office published only in electronic form, follows.

SEQUENCE LISTING (5450 sequences)

SEQ ID NO: 1 - RNA, 17 nt, Homo sapiens
cuaaugcuuuugguaca

SEQ ID NO: 2 - RNA, 17 nt, Homo sapiens
uaaugcuuuugguacaa

SEQ ID NO: 3 - RNA, 17 nt, Homo sapiens
aaugcuuuugguacaaa

SEQ ID NO: 4 - RNA, 17 nt, Homo sapiens
cuuuugguacaaaugga

SEQ ID NO: 5 - RNA, 17 nt, Homo sapiens
uguggaauauaauugaa

SEQ ID NO: 6 - RNA, 17 nt, Homo sapiens
uggaauauaauugaaua

SEQ ID NO: 7 - RNA, 17 nt, Homo sapiens
aauauaauugaauauuu

SEQ ID NO: 8 - RNA, 17 nt, Homo sapiens
aauugaauauuuucuug

SEQ ID NO: 9 - RNA, 17 nt, Homo sapiens
uugaauauuuucuuguu

SEQ ID NO: 10 - RNA, 17 nt, Homo sapiens
ugaauauuuucuuguuu

SEQ ID NO: 11 - RNA, 17 nt, Homo sapiens
gaauauuuucuuguuua

SEQ ID NO: 12 - RNA, 17 nt, Homo sapiens
aauauuuucuuguuuaa

SEQ ID NO: 13 - RNA, 17 nt, Homo sapiens
uauuuucuuguuuaagg

SEQ ID NO: 14 - RNA, 17 nt, Homo sapiens
uuucuuguuuaagggga

SEQ ID NO: 15 - RNA, 17 nt, Homo sapiens
uucuuguuuaaggggag

SEQ ID NO: 16 - RNA, 17 nt, Homo sapiens
ucuuguuuaaggggagc

SEQ ID NO: 17 - RNA, 17 nt, Homo sapiens
agagguguugagguuau

SEQ ID NO: 18 - RNA, 17 nt, Homo sapiens
guugagguuaugucaag

SEQ ID NO: 19 - RNA, 17 nt, Homo sapiens
uugagguuaugucaagc

SEQ ID NO: 20 - RNA, 17 nt, Homo sapiens
gguuaugucaagcaucu

SEQ ID NO: 21 - RNA, 17 nt, Homo sapiens
ucaagcaucuggcacag

SEQ ID NO: 22 - RNA, 17 nt, Homo sapiens
auggaaauauuuacaag

SEQ ID NO: 23 - RNA, 17 nt, Homo sapiens
ggaaauauuuacaagua

SEQ ID NO: 24 - RNA, 17 nt, Homo sapiens
gaaauauuuacaaguac

SEQ ID NO: 25 - RNA, 17 nt, Homo sapiens
aaauauuuacaaguacg

SEQ ID NO: 26 - RNA, 17 nt, Homo sapiens
uuacaaguacgcaauuu

SEQ ID NO: 27 - RNA, 17 nt, Homo sapiens
uacgcaauuugagacua

SEQ ID NO: 28 - RNA, 17 nt, Homo sapiens
acgcaauuugagacuaa

SEQ ID NO: 29 - RNA, 17 nt, Homo sapiens
uugagacuaagauauug

SEQ ID NO: 30 - RNA, 17 nt, Homo sapiens
acuaagauauuguuauc

SEQ ID NO: 31 - RNA, 17 nt, Homo sapiens
uaagauauuguuaucau

SEQ ID NO: 32 - RNA, 17 nt, Homo sapiens
gauauuguuaucauucu

SEQ ID NO: 33 - RNA, 17 nt, Homo sapiens
auauuguuaucauucuc

SEQ ID NO: 34 - RNA, 17 nt, Homo sapiens
auuguuaucauucuccu

SEQ ID NO: 35 - RNA, 17 nt, Homo sapiens
guuaucauucuccuauu

SEQ ID NO: 36 - RNA, 17 nt, Homo sapiens
uuaucauucuccuauug

SEQ ID NO: 37 - RNA, 17 nt, Homo sapiens
aucauucuccuauugaa

SEQ ID NO: 38 - RNA, 17 nt, Homo sapiens
auucuccuauugaagac

SEQ ID NO: 39 - RNA, 17 nt, Homo sapiens
ucuccuauugaagacaa

SEQ ID NO: 40 - RNA, 17 nt, Homo sapiens
agagcaauaguaaaaca

SEQ ID NO: 41 - RNA, 17 nt, Homo sapiens
gcaauaguaaaacacau

SEQ ID NO: 42 - RNA, 17 nt, Homo sapiens
aaacacaucaggucagg

SEQ ID NO: 43 - RNA, 17 nt, Homo sapiens
caucaggucaggggguu

SEQ ID NO: 44 - RNA, 17 nt, Homo sapiens
caggggguuaaagaccu

SEQ ID NO: 45 - RNA, 17 nt, Homo sapiens
aggggguuaaagaccug

SEQ ID NO: 46 - RNA, 17 nt, Homo sapiens
ccugugauaaaccacuu

SEQ ID NO: 47 - RNA, 17 nt, Homo sapiens
aaaccacuuccgauaag

SEQ ID NO: 48 - RNA, 17 nt, Homo sapiens
aaccacuuccgauaagu

SEQ ID NO: 49 - RNA, 17 nt, Homo sapiens
cuuccgauaaguuggaa

SEQ ID NO: 50 - RNA, 17 nt, Homo sapiens
cgauaaguuggaaacgu

SEQ ID NO: 51 - RNA, 17 nt, Homo sapiens
acgugugucuauauuuu

SEQ ID NO: 52 - RNA, 17 nt, Homo sapiens
gugugucuauauuuuca

SEQ ID NO: 53 - RNA, 17 nt, Homo sapiens
gugucuauauuuucaua

SEQ ID NO: 54 - RNA, 17 nt, Homo sapiens
gucuauauuuucauauc

SEQ ID NO: 55 - RNA, 17 nt, Homo sapiens
ucuauauuuucauaucu

SEQ ID NO: 56 - RNA, 17 nt, Homo sapiens
cuauauuuucauaucug

SEQ ID NO: 57 - RNA, 17 nt, Homo sapiens
uauauuuucauaucugu

SEQ ID NO: 58 - RNA, 17 nt, Homo sapiens
auuuucauaucuguaua

SEQ ID NO: 59 - RNA, 17 nt, Homo sapiens
uuucauaucuguauaua

SEQ ID NO: 60 - RNA, 17 nt, Homo sapiens
auaucuguauauauaua

SEQ ID NO: 61 - RNA, 17 nt, Homo sapiens
aucuguauauauauaau

SEQ ID NO: 62 - RNA, 17 nt, Homo sapiens
cuguauauauauaaugg

SEQ ID NO: 63 - RNA, 17 nt, Homo sapiens
guauauauauaauggua

SEQ ID NO: 64 - RNA, 17 nt, Homo sapiens
auauauauaaugguaaa

SEQ ID NO: 65 - RNA, 17 nt, Homo sapiens
auaaugguaaagaaaga

SEQ ID NO: 66 - RNA, 17 nt, Homo sapiens
agacaccuucguaaccc

SEQ ID NO: 67 - RNA, 17 nt, Homo sapiens
gacaccuucguaacccg

SEQ ID NO: 68 - RNA, 17 nt, Homo sapiens
accuucguaacccgcau

SEQ ID NO: 69 - RNA, 17 nt, Homo sapiens
acccgcauuuuccaaag

SEQ ID NO: 70 - RNA, 17 nt, Homo sapiens
cccgcauuuuccaaaga

SEQ ID NO: 71 - RNA, 17 nt, Homo sapiens
ccgcauuuuccaaagag

SEQ ID NO: 72 - RNA, 17 nt, Homo sapiens
cgcauuuuccaaagaga

SEQ ID NO: 73 - RNA, 17 nt, Homo sapiens
agaggaaucacagggag

SEQ ID NO: 74 - RNA, 17 nt, Homo sapiens
ggagauguacagcaaug

SEQ ID NO: 75 - RNA, 17 nt, Homo sapiens
ggggccauuuaagaguu

SEQ ID NO: 76 - RNA, 17 nt, Homo sapiens
gggccauuuaagaguuc

SEQ ID NO: 77 - RNA, 17 nt, Homo sapiens
ggccauuuaagaguucu

SEQ ID NO: 78 - RNA, 17 nt, Homo sapiens
uuaagaguucuguguuc

SEQ ID NO: 79 - RNA, 17 nt, Homo sapiens
uaagaguucuguguuca

SEQ ID NO: 80 - RNA, 17 nt, Homo sapiens
uucuguguucaucuuga

SEQ ID NO: 81 - RNA, 17 nt, Homo sapiens
ucuguguucaucuugau

SEQ ID NO: 82 - RNA, 17 nt, Homo sapiens
guguucaucuugauucu

SEQ ID NO: 83 - RNA, 17 nt, Homo sapiens
guucaucuugauucuuc

SEQ ID NO: 84 - RNA, 17 nt, Homo sapiens
aucuugauucuucaccu

SEQ ID NO: 85 - RNA, 17 nt, Homo sapiens
ucuugauucuucaccuu

SEQ ID NO: 86 - RNA, 17 nt, Homo sapiens
uugauucuucaccuucu

SEQ ID NO: 87 - RNA, 17 nt, Homo sapiens
ugauucuucaccuucua

SEQ ID NO: 88 - RNA, 17 nt, Homo sapiens
cuucaccuucuagaagg

SEQ ID NO: 89 - RNA, 17 nt, Homo sapiens
uucaccuucuagaaggg

SEQ ID NO: 90 - RNA, 17 nt, Homo sapiens
caccuucuagaaggggc

SEQ ID NO: 91 - RNA, 17 nt, Homo sapiens
cccugaguaauucacuc

SEQ ID NO: 92 - RNA, 17 nt, Homo sapiens
ugaguaauucacucauu

SEQ ID NO: 93 - RNA, 17 nt, Homo sapiens
gaguaauucacucauuc

SEQ ID NO: 94 - RNA, 17 nt, Homo sapiens
aauucacucauucagcu

SEQ ID NO: 95 - RNA, 17 nt, Homo sapiens
ucacucauucagcugaa

SEQ ID NO: 96 - RNA, 17 nt, Homo sapiens
cacucauucagcugaac

SEQ ID NO: 97 - RNA, 17 nt, Homo sapiens
caauggcuaugaaggca

SEQ ID NO: 98 - RNA, 17 nt, Homo sapiens
gaaggcauugucguugc

SEQ ID NO: 99 - RNA, 17 nt, Homo sapiens
ggcauugucguugcaau

SEQ ID NO: 100 - RNA, 17 nt, Homo sapiens
auugucguugcaaucga

SEQ ID NO: 101 - RNA, 17 nt, Homo sapiens
guugcaaucgaccccaa

SEQ ID NO: 102 - RNA, 17 nt, Homo sapiens
gaaacacucauucaaca

SEQ ID NO: 103 - RNA, 17 nt, Homo sapiens
acacucauucaacaaau

SEQ ID NO: 104 - RNA, 17 nt, Homo sapiens
cacucauucaacaaaua

SEQ ID NO: 105 - RNA, 17 nt, Homo sapiens
caacaaauaaaggacau

SEQ ID NO: 106 - RNA, 17 nt, Homo sapiens
ccaggcaucucuguauc

SEQ ID NO: 107 - RNA, 17 nt, Homo sapiens
aggcaucucuguaucug

SEQ ID NO: 108 - RNA, 17 nt, Homo sapiens
aucucuguaucuguuug

SEQ ID NO: 109 - RNA, 17 nt, Homo sapiens
cucuguaucuguuugaa

SEQ ID NO: 110 - RNA, 17 nt, Homo sapiens
guaucuguuugaagcua

SEQ ID NO: 111 - RNA, 17 nt, Homo sapiens
uaucuguuugaagcuac

SEQ ID NO: 112 - RNA, 17 nt, Homo sapiens
uugaagcuacaggaaag

SEQ ID NO: 113 - RNA, 17 nt, Homo sapiens
aaagcgauuuuauuuca

SEQ ID NO: 114 - RNA, 17 nt, Homo sapiens
aagcgauuuuauuucaa

SEQ ID NO: 115 - RNA, 17 nt, Homo sapiens
agcgauuuuauuucaaa

SEQ ID NO: 116 - RNA, 17 nt, Homo sapiens
gcgauuuuauuucaaaa

SEQ ID NO: 117 - RNA, 17 nt, Homo sapiens
gauuuuauuucaaaaau

SEQ ID NO: 118 - RNA, 17 nt, Homo sapiens
auuuuauuucaaaaaug

SEQ ID NO: 119 - RNA, 17 nt, Homo sapiens
uuuuauuucaaaaaugu

SEQ ID NO: 120 - RNA, 17 nt, Homo sapiens
aaaaauguugccauuuu

SEQ ID NO: 121 - RNA, 17 nt, Homo sapiens
guugccauuuugauucc

SEQ ID NO: 122 - RNA, 17 nt, Homo sapiens
uugccauuuugauuccu

SEQ ID NO: 123 - RNA, 17 nt, Homo sapiens
ugccauuuugauuccug

SEQ ID NO: 124 - RNA, 17 nt, Homo sapiens
auuuugauuccugaaac

SEQ ID NO: 125 - RNA, 17 nt, Homo sapiens
uuuugauuccugaaaca

SEQ ID NO: 126 - RNA, 17 nt, Homo sapiens
ggcugacuaugugagac

SEQ ID NO: 127 - RNA, 17 nt, Homo sapiens
ccaaaacuugagaccua

SEQ ID NO: 128 - RNA, 17 nt, Homo sapiens
ugagaccuacaaaaaug

SEQ ID NO: 129 - RNA, 17 nt, Homo sapiens
gcugauguucugguugc

SEQ ID NO: 130 - RNA, 17 nt, Homo sapiens
cugauguucugguugcu

SEQ ID NO: 131 - RNA, 17 nt, Homo sapiens
guucugguugcugaguc

SEQ ID NO: 132 - RNA, 17 nt, Homo sapiens
ugcugagucuacuccuc

SEQ ID NO: 133 - RNA, 17 nt, Homo sapiens
cugagucuacuccucca

SEQ ID NO: 134 - RNA, 17 nt, Homo sapiens
agucuacuccuccaggu

SEQ ID NO: 135 - RNA, 17 nt, Homo sapiens
cuacuccuccagguaau

SEQ ID NO: 136 - RNA, 17 nt, Homo sapiens
cuccagguaaugaugaa

SEQ ID NO: 137 - RNA, 17 nt, Homo sapiens
ugaacccuacacugagc

SEQ ID NO: 138 - RNA, 17 nt, Homo sapiens
gaaaggauccaccucac

SEQ ID NO: 139 - RNA, 17 nt, Homo sapiens
auccaccucacuccuga

SEQ ID NO: 140 - RNA, 17 nt, Homo sapiens
accucacuccugauuuc

SEQ ID NO: 141 - RNA, 17 nt, Homo sapiens
cuccugauuucauugca

SEQ ID NO: 142 - RNA, 17 nt, Homo sapiens
uccugauuucauugcag

SEQ ID NO: 143 - RNA, 17 nt, Homo sapiens
ccugauuucauugcagg

SEQ ID NO: 144 - RNA, 17 nt, Homo sapiens
gauuucauugcaggaaa

SEQ ID NO: 145 - RNA, 17 nt, Homo sapiens
aaaaaaguuagcugaau

SEQ ID NO: 146 - RNA, 17 nt, Homo sapiens
aaaaaguuagcugaaua

SEQ ID NO: 147 - RNA, 17 nt, Homo sapiens
agcugaauauggaccac

SEQ ID NO: 148 - RNA, 17 nt, Homo sapiens
cacaagguaaggcauuu

SEQ ID NO: 149 - RNA, 17 nt, Homo sapiens
uaaggcauuuguccaug

SEQ ID NO: 150 - RNA, 17 nt, Homo sapiens
aaggcauuuguccauga

SEQ ID NO: 151 - RNA, 17 nt, Homo sapiens
gcauuuguccaugagug

SEQ ID NO: 152 - RNA, 17 nt, Homo sapiens
agugggcucaucuacga

SEQ ID NO: 153 - RNA, 17 nt, Homo sapiens
gggcucaucuacgaugg

SEQ ID NO: 154 - RNA, 17 nt, Homo sapiens
gcucaucuacgaugggg

SEQ ID NO: 155 - RNA, 17 nt, Homo sapiens
uggggaguauuugacga

SEQ ID NO: 156 - RNA, 17 nt, Homo sapiens
gggaguauuugacgagu

SEQ ID NO: 157 - RNA, 17 nt, Homo sapiens
ggaguauuugacgagua

SEQ ID NO: 158 - RNA, 17 nt, Homo sapiens
ugacgaguacaauaaug

SEQ ID NO: 159 - RNA, 17 nt, Homo sapiens
aguacaauaaugaugag

SEQ ID NO: 160 - RNA, 17 nt, Homo sapiens
ugagaaauucuacuuau

SEQ ID NO: 161 - RNA, 17 nt, Homo sapiens
gagaaauucuacuuauc

SEQ ID NO: 162 - RNA, 17 nt, Homo sapiens
gaaauucuacuuaucca

SEQ ID NO: 163 - RNA, 17 nt, Homo sapiens
auucuacuuauccaaug

SEQ ID NO: 164 - RNA, 17 nt, Homo sapiens
uucuacuuauccaaugg

SEQ ID NO: 165 - RNA, 17 nt, Homo sapiens
cuacuuauccaauggaa

SEQ ID NO: 166 - RNA, 17 nt, Homo sapiens
ggaagaauacaagcagu

SEQ ID NO: 167 - RNA, 17 nt, Homo sapiens
caagcaguaagauguuc

SEQ ID NO: 168 - RNA, 17 nt, Homo sapiens
uaagauguucagcaggu

SEQ ID NO: 169 - RNA, 17 nt, Homo sapiens
aagauguucagcaggua

SEQ ID NO: 170 - RNA, 17 nt, Homo sapiens
cagcagguauuacuggu

SEQ ID NO: 171 - RNA, 17 nt, Homo sapiens
gcagguauuacugguac

SEQ ID NO: 172 - RNA, 17 nt, Homo sapiens
cagguauuacugguaca

SEQ ID NO: 173 - RNA, 17 nt, Homo sapiens
uuacugguacaaaugua

SEQ ID NO: 174 - RNA, 17 nt, Homo sapiens
acaaauguaguaaagaa

SEQ ID NO: 175 - RNA, 17 nt, Homo sapiens
aauguaguaaagaagug

SEQ ID NO: 176 - RNA, 17 nt, Homo sapiens
agaagugucagggaggc

SEQ ID NO: 177 - RNA, 17 nt, Homo sapiens
gcagcuguuacaccaaa

SEQ ID NO: 178 - RNA, 17 nt, Homo sapiens
cagcuguuacaccaaaa

SEQ ID NO: 179 - RNA, 17 nt, Homo sapiens
augcacauucaauaaag

SEQ ID NO: 180 - RNA, 17 nt, Homo sapiens
ugcacauucaauaaagu

SEQ ID NO: 181 - RNA, 17 nt, Homo sapiens
cauucaauaaaguuaca

SEQ ID NO: 182 - RNA, 17 nt, Homo sapiens
aauaaaguuacaggacu

SEQ ID NO: 183 - RNA, 17 nt, Homo sapiens
auaaaguuacaggacuc

SEQ ID NO: 184 - RNA, 17 nt, Homo sapiens
acaggacucuaugaaaa

SEQ ID NO: 185 - RNA, 17 nt, Homo sapiens
aggacucuaugaaaaag

SEQ ID NO: 186 - RNA, 17 nt, Homo sapiens
augugaguuuguucucc

SEQ ID NO: 187 - RNA, 17 nt, Homo sapiens
ugugaguuuguucucca

SEQ ID NO: 188 - RNA, 17 nt, Homo sapiens
gaguuuguucuccaauc

SEQ ID NO: 189 - RNA, 17 nt, Homo sapiens
aguuuguucuccaaucc

SEQ ID NO: 190 - RNA, 17 nt, Homo sapiens
uuuguucuccaaucccg

SEQ ID NO: 191 - RNA, 17 nt, Homo sapiens
ucuccaaucccgccaga

SEQ ID NO: 192 - RNA, 17 nt, Homo sapiens
agaaggcuucuauaaug

SEQ ID NO: 193 - RNA, 17 nt, Homo sapiens
gaaggcuucuauaaugu

SEQ ID NO: 194 - RNA, 17 nt, Homo sapiens
aggcuucuauaauguuu

SEQ ID NO: 195 - RNA, 17 nt, Homo sapiens
gcuucuauaauguuugc

SEQ ID NO: 196 - RNA, 17 nt, Homo sapiens
uauaauguuugcacaac

SEQ ID NO: 197 - RNA, 17 nt, Homo sapiens
auaauguuugcacaaca

SEQ ID NO: 198 - RNA, 17 nt, Homo sapiens
caacauguugauucuau

SEQ ID NO: 199 - RNA, 17 nt, Homo sapiens
auguugauucuauaguu

SEQ ID NO: 200 - RNA, 17 nt, Homo sapiens
uguugauucuauaguug

SEQ ID NO: 201 - RNA, 17 nt, Homo sapiens
uugauucuauaguugaa

SEQ ID NO: 202 - RNA, 17 nt, Homo sapiens
gauucuauaguugaauu

SEQ ID NO: 203 - RNA, 17 nt, Homo sapiens
ucuauaguugaauucug

SEQ ID NO: 204 - RNA, 17 nt, Homo sapiens
aguugaauucuguacag

SEQ ID NO: 205 - RNA, 17 nt, Homo sapiens
guugaauucuguacaga

SEQ ID NO: 206 - RNA, 17 nt, Homo sapiens
aauucuguacagaacaa

SEQ ID NO: 207 - RNA, 17 nt, Homo sapiens
aagaagcuccaaacaag

SEQ ID NO: 208 - RNA, 17 nt, Homo sapiens
agcaaaaucaaaaaugc

SEQ ID NO: 209 - RNA, 17 nt, Homo sapiens
aaugcaaucuccgaagc

SEQ ID NO: 210 - RNA, 17 nt, Homo sapiens
ugcaaucuccgaagcac

SEQ ID NO: 211 - RNA, 17 nt, Homo sapiens
gaagugauccgugauuc

SEQ ID NO: 212 - RNA, 17 nt, Homo sapiens
uccgugauucugaggac

SEQ ID NO: 213 - RNA, 17 nt, Homo sapiens
ccgugauucugaggacu

SEQ ID NO: 214 - RNA, 17 nt, Homo sapiens
ugaggacuuuaagaaaa

SEQ ID NO: 215 - RNA, 17 nt, Homo sapiens
gaggacuuuaagaaaac

SEQ ID NO: 216 - RNA, 17 nt, Homo sapiens
aggacuuuaagaaaacc

SEQ ID NO: 217 - RNA, 17 nt, Homo sapiens
aaaccacuccuaugaca

SEQ ID NO: 218 - RNA, 17 nt, Homo sapiens
ccacuccuaugacaaca

SEQ ID NO: 219 - RNA, 17 nt, Homo sapiens
caccaaaucccaccuuc

SEQ ID NO: 220 - RNA, 17 nt, Homo sapiens
ucccaccuucucauugc

SEQ ID NO: 221 - RNA, 17 nt, Homo sapiens
cccaccuucucauugcu

SEQ ID NO: 222 - RNA, 17 nt, Homo sapiens
caccuucucauugcugc

SEQ ID NO: 223 - RNA, 17 nt, Homo sapiens
cuucucauugcugcaga

SEQ ID NO: 224 - RNA, 17 nt, Homo sapiens
cugcagauuggacaaag

SEQ ID NO: 225 - RNA, 17 nt, Homo sapiens
caaagaauuguguguuu

SEQ ID NO: 226 - RNA, 17 nt, Homo sapiens
uuguguguuuaguccuu

SEQ ID NO: 227 - RNA, 17 nt, Homo sapiens
uguguguuuaguccuug

SEQ ID NO: 228 - RNA, 17 nt, Homo sapiens
guguguuuaguccuuga

SEQ ID NO: 229 - RNA, 17 nt, Homo sapiens
uguuuaguccuugacaa

SEQ ID NO: 230 - RNA, 17 nt, Homo sapiens
uuaguccuugacaaauc

SEQ ID NO: 231 - RNA, 17 nt, Homo sapiens
ugacaaaucuggaagca

SEQ ID NO: 232 - RNA, 17 nt, Homo sapiens
cgacugguaaccgccuc

SEQ ID NO: 233 - RNA, 17 nt, Homo sapiens
aaccgccucaaucgacu

SEQ ID NO: 234 - RNA, 17 nt, Homo sapiens
gccucaaucgacugaau

SEQ ID NO: 235 - RNA, 17 nt, Homo sapiens
gacugaaucaagcaggc

SEQ ID NO: 236 - RNA, 17 nt, Homo sapiens
ggccagcuuuuccugcu

SEQ ID NO: 237 - RNA, 17 nt, Homo sapiens
gccagcuuuuccugcug

SEQ ID NO: 238 - RNA, 17 nt, Homo sapiens
ccagcuuuuccugcugc

SEQ ID NO: 239 - RNA, 17 nt, Homo sapiens
cagcuuuuccugcugca

SEQ ID NO: 240 - RNA, 17 nt, Homo sapiens
cagacaguugagcuggg

SEQ ID NO: 241 - RNA, 17 nt, Homo sapiens
gcugggguccuggguug

SEQ ID NO: 242 - RNA, 17 nt, Homo sapiens
uccuggguugggauggu

SEQ ID NO: 243 - RNA, 17 nt, Homo sapiens
ggugacauuugacagug

SEQ ID NO: 244 - RNA, 17 nt, Homo sapiens
gugacauuugacagugc

SEQ ID NO: 245 - RNA, 17 nt, Homo sapiens
gcccauguacaaaguga

SEQ ID NO: 246 - RNA, 17 nt, Homo sapiens
agugaacucauacagau

SEQ ID NO: 247 - RNA, 17 nt, Homo sapiens
gaacucauacagauaaa

SEQ ID NO: 248 - RNA, 17 nt, Homo sapiens
auacagauaaacagugg

SEQ ID NO: 249 - RNA, 17 nt, Homo sapiens
gacacacucgccaaaag

SEQ ID NO: 250 - RNA, 17 nt, Homo sapiens
caaaagauuaccugcag

SEQ ID NO: 251 - RNA, 17 nt, Homo sapiens
aaaagauuaccugcagc

SEQ ID NO: 252 - RNA, 17 nt, Homo sapiens
cagcagcuucaggaggg

SEQ ID NO: 253 - RNA, 17 nt, Homo sapiens
agcagcuucaggaggga

SEQ ID NO: 254 - RNA, 17 nt, Homo sapiens
agggacguccaucugca

SEQ ID NO: 255 - RNA, 17 nt, Homo sapiens
acguccaucugcagcgg

SEQ ID NO: 256 - RNA, 17 nt, Homo sapiens
agcgggcuucgaucggc

SEQ ID NO: 257 - RNA, 17 nt, Homo sapiens
gcgggcuucgaucggca

SEQ ID NO: 258 - RNA, 17 nt, Homo sapiens
gcuucgaucggcauuua

SEQ ID NO: 259 - RNA, 17 nt, Homo sapiens
aucggcauuuacuguga

SEQ ID NO: 260 - RNA, 17 nt, Homo sapiens
ucggcauuuacugugau

SEQ ID NO: 261 - RNA, 17 nt, Homo sapiens
cggcauuuacugugauu

SEQ ID NO: 262 - RNA, 17 nt, Homo sapiens
acugugauuaggaagaa

SEQ ID NO: 263 - RNA, 17 nt, Homo sapiens
cugugauuaggaagaaa

SEQ ID NO: 264 - RNA, 17 nt, Homo sapiens
gaagaaauauccaacug

SEQ ID NO: 265 - RNA, 17 nt, Homo sapiens
agaaauauccaacugau

SEQ ID NO: 266 - RNA, 17 nt, Homo sapiens
ugauggaucugaaauug

SEQ ID NO: 267 - RNA, 17 nt, Homo sapiens
ucugaaauugugcugcu

SEQ ID NO: 268 - RNA, 17 nt, Homo sapiens
acaacacuauaaguggg

SEQ ID NO: 269 - RNA, 17 nt, Homo sapiens
aacacuauaagugggug

SEQ ID NO: 270 - RNA, 17 nt, Homo sapiens
ugggugcuuuaacgagg

SEQ ID NO: 271 - RNA, 17 nt, Homo sapiens
gggugcuuuaacgaggu

SEQ ID NO: 272 - RNA, 17 nt, Homo sapiens
ggugcuuuaacgagguc

SEQ ID NO: 273 - RNA, 17 nt, Homo sapiens
aacgaggucaaacaaag

SEQ ID NO: 274 - RNA, 17 nt, Homo sapiens
ggugccaucauccacac

SEQ ID NO: 275 - RNA, 17 nt, Homo sapiens
gccaucauccacacagu

SEQ ID NO: 276 - RNA, 17 nt, Homo sapiens
cacacagucgcuuuggg

SEQ ID NO: 277 - RNA, 17 nt, Homo sapiens
cagucgcuuuggggccc

SEQ ID NO: 278 - RNA, 17 nt, Homo sapiens
agucgcuuuggggcccu

SEQ ID NO: 279 - RNA, 17 nt, Homo sapiens
ggggcccucugcagcuc

SEQ ID NO: 280 - RNA, 17 nt, Homo sapiens
cugcagcucaagaacua

SEQ ID NO: 281 - RNA, 17 nt, Homo sapiens
caagaacuagaggagcu

SEQ ID NO: 282 - RNA, 17 nt, Homo sapiens
ggagcuguccaaaauga

SEQ ID NO: 283 - RNA, 17 nt, Homo sapiens
caggagguuuacagaca

SEQ ID NO: 284 - RNA, 17 nt, Homo sapiens
aggagguuuacagacau

SEQ ID NO: 285 - RNA, 17 nt, Homo sapiens
ggagguuuacagacaua

SEQ ID NO: 286 - RNA, 17 nt, Homo sapiens
acagacauaugcuucag

SEQ ID NO: 287 - RNA, 17 nt, Homo sapiens
cauaugcuucagaucaa

SEQ ID NO: 288 - RNA, 17 nt, Homo sapiens
auaugcuucagaucaag

SEQ ID NO: 289 - RNA, 17 nt, Homo sapiens
cuucagaucaaguucag

SEQ ID NO: 290 - RNA, 17 nt, Homo sapiens
gaucaaguucagaacaa

SEQ ID NO: 291 - RNA, 17 nt, Homo sapiens
aucaaguucagaacaau

SEQ ID NO: 292 - RNA, 17 nt, Homo sapiens
aauggccucauugaugc

SEQ ID NO: 293 - RNA, 17 nt, Homo sapiens
ggccucauugaugcuuu

SEQ ID NO: 294 - RNA, 17 nt, Homo sapiens
uugaugcuuuuggggcc

SEQ ID NO: 295 - RNA, 17 nt, Homo sapiens
ugaugcuuuuggggccc

SEQ ID NO: 296 - RNA, 17 nt, Homo sapiens
gaugcuuuuggggcccu

SEQ ID NO: 297 - RNA, 17 nt, Homo sapiens
ggggcccuuucaucagg

SEQ ID NO: 298 - RNA, 17 nt, Homo sapiens
gggcccuuucaucagga

SEQ ID NO: 299 - RNA, 17 nt, Homo sapiens
ggcccuuucaucaggaa

SEQ ID NO: 300 - RNA, 17 nt, Homo sapiens
ccuuucaucaggaaaug

SEQ ID NO: 301 - RNA, 17 nt, Homo sapiens
ggagcugucucucagcg

SEQ ID NO: 302 - RNA, 17 nt, Homo sapiens
agcugucucucagcgcu

SEQ ID NO: 303 - RNA, 17 nt, Homo sapiens
cugucucucagcgcucc

SEQ ID NO: 304 - RNA, 17 nt, Homo sapiens
ucagcgcuccauccagc

SEQ ID NO: 305 - RNA, 17 nt, Homo sapiens
cgcuccauccagcuuga

SEQ ID NO: 306 - RNA, 17 nt, Homo sapiens
auccagcuugagaguaa

SEQ ID NO: 307 - RNA, 17 nt, Homo sapiens
uugagaguaagggauua

SEQ ID NO: 308 - RNA, 17 nt, Homo sapiens
uaagggauuaacccucc

SEQ ID NO: 309 - RNA, 17 nt, Homo sapiens
aagggauuaacccucca

SEQ ID NO: 310 - RNA, 17 nt, Homo sapiens
uuaacccuccagaacag

SEQ ID NO: 311 - RNA, 17 nt, Homo sapiens
acagugaucguggacag

SEQ ID NO: 312 - RNA, 17 nt, Homo sapiens
aggacacuuuguuucuu

SEQ ID NO: 313 - RNA, 17 nt, Homo sapiens
ggacacuuuguuucuua

SEQ ID NO: 314 - RNA, 17 nt, Homo sapiens
cacuuuguuucuuauca

SEQ ID NO: 315 - RNA, 17 nt, Homo sapiens
acuuuguuucuuaucac

SEQ ID NO: 316 - RNA, 17 nt, Homo sapiens
cuuuguuucuuaucacc

SEQ ID NO: 317 - RNA, 17 nt, Homo sapiens
uuguuucuuaucaccug

SEQ ID NO: 318 - RNA, 17 nt, Homo sapiens
uguuucuuaucaccugg

SEQ ID NO: 319 - RNA, 17 nt, Homo sapiens
uuucuuaucaccuggac

SEQ ID NO: 320 - RNA, 17 nt, Homo sapiens
cgcagccuccccaaauc

SEQ ID NO: 321 - RNA, 17 nt, Homo sapiens
ccccaaauccuucucug

SEQ ID NO: 322 - RNA, 17 nt, Homo sapiens
caaauccuucucuggga

SEQ ID NO: 323 - RNA, 17 nt, Homo sapiens
aaauccuucucugggau

SEQ ID NO: 324 - RNA, 17 nt, Homo sapiens
auccuucucugggaucc

SEQ ID NO: 325 - RNA, 17 nt, Homo sapiens
ucugggaucccagugga

SEQ ID NO: 326 - RNA, 17 nt, Homo sapiens
agguggcuuuguagugg

SEQ ID NO: 327 - RNA, 17 nt, Homo sapiens
gguggcuuuguagugga

SEQ ID NO: 328 - RNA, 17 nt, Homo sapiens
ggcuuuguaguggacaa

SEQ ID NO: 329 - RNA, 17 nt, Homo sapiens
aauggccuaccuccaaa

SEQ ID NO: 330 - RNA, 17 nt, Homo sapiens
gccuaccuccaaauccc

SEQ ID NO: 331 - RNA, 17 nt, Homo sapiens
cuccaaaucccaggcau

SEQ ID NO: 332 - RNA, 17 nt, Homo sapiens
ccaggcauugcuaaggu

SEQ ID NO: 333 - RNA, 17 nt, Homo sapiens
gcauugcuaagguuggc

SEQ ID NO: 334 - RNA, 17 nt, Homo sapiens
gcuaagguuggcacuug

SEQ ID NO: 335 - RNA, 17 nt, Homo sapiens
uuggcacuuggaaauac

SEQ ID NO: 336 - RNA, 17 nt, Homo sapiens
uuggaaauacagucugc

SEQ ID NO: 337 - RNA, 17 nt, Homo sapiens
aauacagucugcaagca

SEQ ID NO: 338 - RNA, 17 nt, Homo sapiens
agcaagcucacaaaccu

SEQ ID NO: 339 - RNA, 17 nt, Homo sapiens
acaaaccuugacccuga

SEQ ID NO: 340 - RNA, 17 nt, Homo sapiens
cugacugucacgucccg

SEQ ID NO: 341 - RNA, 17 nt, Homo sapiens
ugucacgucccgugcgu

SEQ ID NO: 342 - RNA, 17 nt, Homo sapiens
ccgugcguccaaugcua

SEQ ID NO: 343 - RNA, 17 nt, Homo sapiens
ccaaugcuacccugccu

SEQ ID NO: 344 - RNA, 17 nt, Homo sapiens
cccugccuccaauuaca

SEQ ID NO: 345 - RNA, 17 nt, Homo sapiens
ccuccaauuacagugac

SEQ ID NO: 346 - RNA, 17 nt, Homo sapiens
cuccaauuacagugacu

SEQ ID NO: 347 - RNA, 17 nt, Homo sapiens
cagugacuuccaaaacg

SEQ ID NO: 348 - RNA, 17 nt, Homo sapiens
agugacuuccaaaacga

SEQ ID NO: 349 - RNA, 17 nt, Homo sapiens
cagcaaauuccccagcc

SEQ ID NO: 350 - RNA, 17 nt, Homo sapiens
agcaaauuccccagccc

SEQ ID NO: 351 - RNA, 17 nt, Homo sapiens
ccagcccucugguaguu

SEQ ID NO: 352 - RNA, 17 nt, Homo sapiens
ccucugguaguuuaugc

SEQ ID NO: 353 - RNA, 17 nt, Homo sapiens
cugguaguuuaugcaaa

SEQ ID NO: 354 - RNA, 17 nt, Homo sapiens
ugguaguuuaugcaaau

SEQ ID NO: 355 - RNA, 17 nt, Homo sapiens
gguaguuuaugcaaaua

SEQ ID NO: 356 - RNA, 17 nt, Homo sapiens
augcaaauauucgccaa

SEQ ID NO: 357 - RNA, 17 nt, Homo sapiens
gcaaauauucgccaagg

SEQ ID NO: 358 - RNA, 17 nt, Homo sapiens
caaauauucgccaagga

SEQ ID NO: 359 - RNA, 17 nt, Homo sapiens
aggagccuccccaauuc

SEQ ID NO: 360 - RNA, 17 nt, Homo sapiens
uccccaauucucagggc

SEQ ID NO: 361 - RNA, 17 nt, Homo sapiens
ccccaauucucagggcc

SEQ ID NO: 362 - RNA, 17 nt, Homo sapiens
ccaauucucagggccag

SEQ ID NO: 363 - RNA, 17 nt, Homo sapiens
gccagugucacagcccu

SEQ ID NO: 364 - RNA, 17 nt, Homo sapiens
gcccugauugaaucagu

SEQ ID NO: 365 - RNA, 17 nt, Homo sapiens
gauugaaucagugaaug

SEQ ID NO: 366 - RNA, 17 nt, Homo sapiens
aaaacaguuaccuugga

SEQ ID NO: 367 - RNA, 17 nt, Homo sapiens
aaacaguuaccuuggaa

SEQ ID NO: 368 - RNA, 17 nt, Homo sapiens
aguuaccuuggaacuac

SEQ ID NO: 369 - RNA, 17 nt, Homo sapiens
uuggaacuacuggauaa

SEQ ID NO: 370 - RNA, 17 nt, Homo sapiens
uacuggauaauggagca

SEQ ID NO: 371 - RNA, 17 nt, Homo sapiens
cugaugcuacuaaggau

SEQ ID NO: 372 - RNA, 17 nt, Homo sapiens
augcuacuaaggaugac

SEQ ID NO: 373 - RNA, 17 nt, Homo sapiens
gacggugucuacucaag

SEQ ID NO: 374 - RNA, 17 nt, Homo sapiens
cggugucuacucaaggu

SEQ ID NO: 375 - RNA, 17 nt, Homo sapiens
ugucuacucaagguauu

SEQ ID NO: 376 - RNA, 17 nt, Homo sapiens
cucaagguauuucacaa

SEQ ID NO: 377 - RNA, 17 nt, Homo sapiens
caagguauuucacaacu

SEQ ID NO: 378 - RNA, 17 nt, Homo sapiens
aagguauuucacaacuu

SEQ ID NO: 379 - RNA, 17 nt, Homo sapiens
agguauuucacaacuua

SEQ ID NO: 380 - RNA, 17 nt, Homo sapiens
ucacaacuuaugacacg

SEQ ID NO: 381 - RNA, 17 nt, Homo sapiens
cacaacuuaugacacga

SEQ ID NO: 382 - RNA, 17 nt, Homo sapiens
cgaaugguagauacagu

SEQ ID NO: 383 - RNA, 17 nt, Homo sapiens
ugguagauacaguguaa

SEQ ID NO: 384 - RNA, 17 nt, Homo sapiens
uacaguguaaaagugcg

SEQ ID NO: 385 - RNA, 17 nt, Homo sapiens
ugcgggcucugggagga

SEQ ID NO: 386 - RNA, 17 nt, Homo sapiens
ggaggaguuaacgcagc

SEQ ID NO: 387 - RNA, 17 nt, Homo sapiens
gaggaguuaacgcagcc

SEQ ID NO: 388 - RNA, 17 nt, Homo sapiens
agagugauaccccagca

SEQ ID NO: 389 - RNA, 17 nt, Homo sapiens
agcacuguacauaccug

SEQ ID NO: 390 - RNA, 17 nt, Homo sapiens
cuguacauaccuggcug

SEQ ID NO: 391 - RNA, 17 nt, Homo sapiens
ggcuggauugagaauga

SEQ ID NO: 392 - RNA, 17 nt, Homo sapiens
gaugaaauacaauggaa

SEQ ID NO: 393 - RNA, 17 nt, Homo sapiens
aauggaauccaccaaga

SEQ ID NO: 394 - RNA, 17 nt, Homo sapiens
ccugaaauuaauaagga

SEQ ID NO: 395 - RNA, 17 nt, Homo sapiens
cugaaauuaauaaggau

SEQ ID NO: 396 - RNA, 17 nt, Homo sapiens
aaauuaauaaggaugau

SEQ ID NO: 397 - RNA, 17 nt, Homo sapiens
gaugauguucaacacaa

SEQ ID NO: 398 - RNA, 17 nt, Homo sapiens
augauguucaacacaag

SEQ ID NO: 399 - RNA, 17 nt, Homo sapiens
aaguguguuucagcaga

SEQ ID NO: 400 - RNA, 17 nt, Homo sapiens
aguguguuucagcagaa

SEQ ID NO: 401 - RNA, 17 nt, Homo sapiens
guguguuucagcagaac

SEQ ID NO: 402 - RNA, 17 nt, Homo sapiens
cagaacauccucgggag

SEQ ID NO: 403 - RNA, 17 nt, Homo sapiens
aacauccucgggaggcu

SEQ ID NO: 404 - RNA, 17 nt, Homo sapiens
gggaggcucauuugugg

SEQ ID NO: 405 - RNA, 17 nt, Homo sapiens
aggcucauuuguggcuu

SEQ ID NO: 406 - RNA, 17 nt, Homo sapiens
ggcucauuuguggcuuc

SEQ ID NO: 407 - RNA, 17 nt, Homo sapiens
uuguggcuucugauguc

SEQ ID NO: 408 - RNA, 17 nt, Homo sapiens
uguggcuucugaugucc

SEQ ID NO: 409 - RNA, 17 nt, Homo sapiens
ucugaugucccaaaugc

SEQ ID NO: 410 - RNA, 17 nt, Homo sapiens
caaaugcucccauaccu

SEQ ID NO: 411 - RNA, 17 nt, Homo sapiens
gcucccauaccugaucu

SEQ ID NO: 412 - RNA, 17 nt, Homo sapiens
uaccugaucucuuccca

SEQ ID NO: 413 - RNA, 17 nt, Homo sapiens
ccugaucucuucccacc

SEQ ID NO: 414 - RNA, 17 nt, Homo sapiens
ugaucucuucccaccug

SEQ ID NO: 415 - RNA, 17 nt, Homo sapiens
gaucucuucccaccugg

SEQ ID NO: 416 - RNA, 17 nt, Homo sapiens
ggccaaaucaccgaccu

SEQ ID NO: 417 - RNA, 17 nt, Homo sapiens
gcggaaauucacggggg

SEQ ID NO: 418 - RNA, 17 nt, Homo sapiens
cggaaauucacgggggc

SEQ ID NO: 419 - RNA, 17 nt, Homo sapiens
ggggcagucucauuaau

SEQ ID NO: 420 - RNA, 17 nt, Homo sapiens
ggcagucucauuaaucu

SEQ ID NO: 421 - RNA, 17 nt, Homo sapiens
agucucauuaaucugac

SEQ ID NO: 422 - RNA, 17 nt, Homo sapiens
gucucauuaaucugacu

SEQ ID NO: 423 - RNA, 17 nt, Homo sapiens
ucauuaaucugacuugg

SEQ ID NO: 424 - RNA, 17 nt, Homo sapiens
aucugacuuggacagcu

SEQ ID NO: 425 - RNA, 17 nt, Homo sapiens
ggacagcuccuggggau

SEQ ID NO: 426 - RNA, 17 nt, Homo sapiens
gggaugauuaugaccau

SEQ ID NO: 427 - RNA, 17 nt, Homo sapiens
ggaugauuaugaccaug

SEQ ID NO: 428 - RNA, 17 nt, Homo sapiens
gaacagcucacaaguau

SEQ ID NO: 429 - RNA, 17 nt, Homo sapiens
ucacaaguauaucauuc

SEQ ID NO: 430 - RNA, 17 nt, Homo sapiens
acaaguauaucauucga

SEQ ID NO: 431 - RNA, 17 nt, Homo sapiens
aaguauaucauucgaau

SEQ ID NO: 432 - RNA, 17 nt, Homo sapiens
uauaucauucgaauaag

SEQ ID NO: 433 - RNA, 17 nt, Homo sapiens
auaucauucgaauaagu

SEQ ID NO: 434 - RNA, 17 nt, Homo sapiens
auucgaauaaguacaag

SEQ ID NO: 435 - RNA, 17 nt, Homo sapiens
gaauaaguacaaguauu

SEQ ID NO: 436 - RNA, 17 nt, Homo sapiens
guacaaguauucuugau

SEQ ID NO: 437 - RNA, 17 nt, Homo sapiens
acaaguauucuugaucu

SEQ ID NO: 438 - RNA, 17 nt, Homo sapiens
caaguauucuugaucuc

SEQ ID NO: 439 - RNA, 17 nt, Homo sapiens
aguauucuugaucucag

SEQ ID NO: 440 - RNA, 17 nt, Homo sapiens
uucuugaucucagagac

SEQ ID NO: 441 - RNA, 17 nt, Homo sapiens
cuugaucucagagacaa

SEQ ID NO: 442 - RNA, 17 nt, Homo sapiens
agacaaguucaaugaau

SEQ ID NO: 443 - RNA, 17 nt, Homo sapiens
gacaaguucaaugaauc

SEQ ID NO: 444 - RNA, 17 nt, Homo sapiens
caaugaaucucuucaag

SEQ ID NO: 445 - RNA, 17 nt, Homo sapiens
augaaucucuucaagug

SEQ ID NO: 446 - RNA, 17 nt, Homo sapiens
gaaucucuucaagugaa

SEQ ID NO: 447 - RNA, 17 nt, Homo sapiens
aaucucuucaagugaau

SEQ ID NO: 448 - RNA, 17 nt, Homo sapiens
aagugaauacuacugcu

SEQ ID NO: 449 - RNA, 17 nt, Homo sapiens
ugaauacuacugcucuc

SEQ ID NO: 450 - RNA, 17 nt, Homo sapiens
cuacugcucucauccca

SEQ ID NO: 451 - RNA, 17 nt, Homo sapiens
acugcucucaucccaaa

SEQ ID NO: 452 - RNA, 17 nt, Homo sapiens
gcucucaucccaaagga

SEQ ID NO: 453 - RNA, 17 nt, Homo sapiens
agccaacucugaggaag

SEQ ID NO: 454 - RNA, 17 nt, Homo sapiens
gaggaagucuuuuuguu

SEQ ID NO: 455 - RNA, 17 nt, Homo sapiens
ggaagucuuuuuguuua

SEQ ID NO: 456 - RNA, 17 nt, Homo sapiens
gaagucuuuuuguuuaa

SEQ ID NO: 457 - RNA, 17 nt, Homo sapiens
aagucuuuuuguuuaaa

SEQ ID NO: 458 - RNA, 17 nt, Homo sapiens
agucuuuuuguuuaaac

SEQ ID NO: 459 - RNA, 17 nt, Homo sapiens
cuuuuuguuuaaaccag

SEQ ID NO: 460 - RNA, 17 nt, Homo sapiens
uuuuuguuuaaaccaga

SEQ ID NO: 461 - RNA, 17 nt, Homo sapiens
uuuuguuuaaaccagaa

SEQ ID NO: 462 - RNA, 17 nt, Homo sapiens
gaaaacauuacuuuuga

SEQ ID NO: 463 - RNA, 17 nt, Homo sapiens
aaaacauuacuuuugaa

SEQ ID NO: 464 - RNA, 17 nt, Homo sapiens
acauuacuuuugaaaau

SEQ ID NO: 465 - RNA, 17 nt, Homo sapiens
cauuacuuuugaaaaug

SEQ ID NO: 466 - RNA, 17 nt, Homo sapiens
auuacuuuugaaaaugg

SEQ ID NO: 467 - RNA, 17 nt, Homo sapiens
gcacagaucuuuucauu

SEQ ID NO: 468 - RNA, 17 nt, Homo sapiens
acagaucuuuucauugc

SEQ ID NO: 469 - RNA, 17 nt, Homo sapiens
cagaucuuuucauugcu

SEQ ID NO: 470 - RNA, 17 nt, Homo sapiens
agaucuuuucauugcua

SEQ ID NO: 471 - RNA, 17 nt, Homo sapiens
gaucuuuucauugcuau

SEQ ID NO: 472 - RNA, 17 nt, Homo sapiens
cuuuucauugcuauuca

SEQ ID NO: 473 - RNA, 17 nt, Homo sapiens
ucauugcuauucaggcu

SEQ ID NO: 474 - RNA, 17 nt, Homo sapiens
auugcuauucaggcugu

SEQ ID NO: 475 - RNA, 17 nt, Homo sapiens
uugcuauucaggcuguu

SEQ ID NO: 476 - RNA, 17 nt, Homo sapiens
caggcuguugauaaggu

SEQ ID NO: 477 - RNA, 17 nt, Homo sapiens
cuguugauaaggucgau

SEQ ID NO: 478 - RNA, 17 nt, Homo sapiens
gauaaggucgaucugaa

SEQ ID NO: 479 - RNA, 17 nt, Homo sapiens
aggucgaucugaaauca

SEQ ID NO: 480 - RNA, 17 nt, Homo sapiens
ucugaaaucagaaauau

SEQ ID NO: 481 - RNA, 17 nt, Homo sapiens
ucagaaauauccaacau

SEQ ID NO: 482 - RNA, 17 nt, Homo sapiens
agaaauauccaacauug

SEQ ID NO: 483 - RNA, 17 nt, Homo sapiens
uccaacauugcacgagu

SEQ ID NO: 484 - RNA, 17 nt, Homo sapiens
gcacgaguaucuuuguu

SEQ ID NO: 485 - RNA, 17 nt, Homo sapiens
acgaguaucuuuguuua

SEQ ID NO: 486 - RNA, 17 nt, Homo sapiens
gaguaucuuuguuuauu

SEQ ID NO: 487 - RNA, 17 nt, Homo sapiens
aguaucuuuguuuauuc

SEQ ID NO: 488 - RNA, 17 nt, Homo sapiens
aucuuuguuuauuccuc

SEQ ID NO: 489 - RNA, 17 nt, Homo sapiens
ucuuuguuuauuccucc

SEQ ID NO: 490 - RNA, 17 nt, Homo sapiens
cuuuguuuauuccucca

SEQ ID NO: 491 - RNA, 17 nt, Homo sapiens
uuguuuauuccuccaca

SEQ ID NO: 492 - RNA, 17 nt, Homo sapiens
uguuuauuccuccacag

SEQ ID NO: 493 - RNA, 17 nt, Homo sapiens
uuauuccuccacagacu

SEQ ID NO: 494 - RNA, 17 nt, Homo sapiens
cacagacuccgccagag

SEQ ID NO: 495 - RNA, 17 nt, Homo sapiens
agacaccuaguccugau

SEQ ID NO: 496 - RNA, 17 nt, Homo sapiens
caccuaguccugaugaa

SEQ ID NO: 497 - RNA, 17 nt, Homo sapiens
ugaaacgucugcuccuu

SEQ ID NO: 498 - RNA, 17 nt, Homo sapiens
cgucugcuccuuguccu

SEQ ID NO: 499 - RNA, 17 nt, Homo sapiens
cugcuccuuguccuaau

SEQ ID NO: 500 - RNA, 17 nt, Homo sapiens
cuccuuguccuaauauu

SEQ ID NO: 501 - RNA, 17 nt, Homo sapiens
cuuguccuaauauucau

SEQ ID NO: 502 - RNA, 17 nt, Homo sapiens
guccuaauauucauauc

SEQ ID NO: 503 - RNA, 17 nt, Homo sapiens
ccuaauauucauaucaa

SEQ ID NO: 504 - RNA, 17 nt, Homo sapiens
cuaauauucauaucaac

SEQ ID NO: 505 - RNA, 17 nt, Homo sapiens
auauucauaucaacagc

SEQ ID NO: 506 - RNA, 17 nt, Homo sapiens
auucauaucaacagcac

SEQ ID NO: 507 - RNA, 17 nt, Homo sapiens
agcaccauuccuggcau

SEQ ID NO: 508 - RNA, 17 nt, Homo sapiens
gcaccauuccuggcauu

SEQ ID NO: 509 - RNA, 17 nt, Homo sapiens
ccuggcauucacauuuu

SEQ ID NO: 510 - RNA, 17 nt, Homo sapiens
cuggcauucacauuuua

SEQ ID NO: 511 - RNA, 17 nt, Homo sapiens
auucacauuuuaaaaau

SEQ ID NO: 512 - RNA, 17 nt, Homo sapiens
uucacauuuuaaaaauu

SEQ ID NO: 513 - RNA, 17 nt, Homo sapiens
ucacauuuuaaaaauua

SEQ ID NO: 514 - RNA, 17 nt, Homo sapiens
cacauuuuaaaaauuau

SEQ ID NO: 515 - RNA, 17 nt, Homo sapiens
uuaaaaauuauguggaa

SEQ ID NO: 516 - RNA, 17 nt, Homo sapiens
uaaaaauuauguggaag

SEQ ID NO: 517 - RNA, 17 nt, Homo sapiens
aaguggauaggagaacu

SEQ ID NO: 518 - RNA, 17 nt, Homo sapiens
gcagcugucaauagccu

SEQ ID NO: 519 - RNA, 17 nt, Homo sapiens
cugucaauagccuaggg

SEQ ID NO: 520 - RNA, 17 nt, Homo sapiens
aauagccuagggcugaa

SEQ ID NO: 521 - RNA, 17 nt, Homo sapiens
ggcugaauuuuugucag

SEQ ID NO: 522 - RNA, 17 nt, Homo sapiens
gcugaauuuuugucaga

SEQ ID NO: 523 - RNA, 17 nt, Homo sapiens
cugaauuuuugucagau

SEQ ID NO: 524 - RNA, 17 nt, Homo sapiens
ugaauuuuugucagaua

SEQ ID NO: 525 - RNA, 17 nt, Homo sapiens
auuuuugucagauaaau

SEQ ID NO: 526 - RNA, 17 nt, Homo sapiens
ugucagauaaauaaaau

SEQ ID NO: 527 - RNA, 17 nt, Homo sapiens
agauaaauaaaauaaau

SEQ ID NO: 528 - RNA, 17 nt, Homo sapiens
aauaaaauaaaucauuc

SEQ ID NO: 529 - RNA, 17 nt, Homo sapiens
aaauaaaucauucaucc

SEQ ID NO: 530 - RNA, 17 nt, Homo sapiens
uaaaucauucauccuuu

SEQ ID NO: 531 - RNA, 17 nt, Homo sapiens
aaaucauucauccuuuu

SEQ ID NO: 532 - RNA, 17 nt, Homo sapiens
ucauucauccuuuuuuu

SEQ ID NO: 533 - RNA, 17 nt, Homo sapiens
uucauccuuuuuuugau

SEQ ID NO: 534 - RNA, 17 nt, Homo sapiens
ucauccuuuuuuugauu

SEQ ID NO: 535 - RNA, 17 nt, Homo sapiens
cauccuuuuuuugauua

SEQ ID NO: 536 - RNA, 17 nt, Homo sapiens
auccuuuuuuugauuau

SEQ ID NO: 537 - RNA, 17 nt, Homo sapiens
uccuuuuuuugauuaua

SEQ ID NO: 538 - RNA, 17 nt, Homo sapiens
ccuuuuuuugauuauaa

SEQ ID NO: 539 - RNA, 17 nt, Homo sapiens
uuuuugauuauaaaauu

SEQ ID NO: 540 - RNA, 17 nt, Homo sapiens
uuuugauuauaaaauuu

SEQ ID NO: 541 - RNA, 17 nt, Homo sapiens
uugauuauaaaauuuuc

SEQ ID NO: 542 - RNA, 17 nt, Homo sapiens
uauaaaauuuucuaaaa

SEQ ID NO: 543 - RNA, 17 nt, Homo sapiens
auaaaauuuucuaaaau

SEQ ID NO: 544 - RNA, 17 nt, Homo sapiens
uaaaauuuucuaaaaug

SEQ ID NO: 545 - RNA, 17 nt, Homo sapiens
aaaauuuucuaaaaugu

SEQ ID NO: 546 - RNA, 17 nt, Homo sapiens
aauuuucuaaaauguau

SEQ ID NO: 547 - RNA, 17 nt, Homo sapiens
uaaaauguauuuuagac

SEQ ID NO: 548 - RNA, 17 nt, Homo sapiens
aaauguauuuuagacuu

SEQ ID NO: 549 - RNA, 17 nt, Homo sapiens
aauguauuuuagacuuc

SEQ ID NO: 550 - RNA, 17 nt, Homo sapiens
auguauuuuagacuucc

SEQ ID NO: 551 - RNA, 17 nt, Homo sapiens
uguauuuuagacuuccu

SEQ ID NO: 552 - RNA, 17 nt, Homo sapiens
uuuagacuuccuguagg

SEQ ID NO: 553 - RNA, 17 nt, Homo sapiens
uuagacuuccuguaggg

SEQ ID NO: 554 - RNA, 17 nt, Homo sapiens
cuuccuguagggggcga

SEQ ID NO: 555 - RNA, 17 nt, Homo sapiens
ggggcgauauacuaaau

SEQ ID NO: 556 - RNA, 17 nt, Homo sapiens
ggcgauauacuaaaugu

SEQ ID NO: 557 - RNA, 17 nt, Homo sapiens
gauauacuaaauguaua

SEQ ID NO: 558 - RNA, 17 nt, Homo sapiens
cuaaauguauauaguac

SEQ ID NO: 559 - RNA, 17 nt, Homo sapiens
aaauguauauaguacau

SEQ ID NO: 560 - RNA, 17 nt, Homo sapiens
auguauauaguacauuu

SEQ ID NO: 561 - RNA, 17 nt, Homo sapiens
uauauaguacauuuaua

SEQ ID NO: 562 - RNA, 17 nt, Homo sapiens
uaguacauuuauacuaa

SEQ ID NO: 563 - RNA, 17 nt, Homo sapiens
aguacauuuauacuaaa

SEQ ID NO: 564 - RNA, 17 nt, Homo sapiens
guacauuuauacuaaau

SEQ ID NO: 565 - RNA, 17 nt, Homo sapiens
acauuuauacuaaaugu

SEQ ID NO: 566 - RNA, 17 nt, Homo sapiens
uuuauacuaaauguauu

SEQ ID NO: 567 - RNA, 17 nt, Homo sapiens
cuaaauguauuccugua

SEQ ID NO: 568 - RNA, 17 nt, Homo sapiens
aaauguauuccuguagg

SEQ ID NO: 569 - RNA, 17 nt, Homo sapiens
aauguauuccuguaggg

SEQ ID NO: 570 - RNA, 17 nt, Homo sapiens
auuccuguagggggcga

SEQ ID NO: 571 - RNA, 17 nt, Homo sapiens
gauauacuaaauguauu

SEQ ID NO: 572 - RNA, 17 nt, Homo sapiens
cuaaauguauuuuagac

SEQ ID NO: 573 - RNA, 17 nt, Homo sapiens
ggggcgauaaaauaaaa

SEQ ID NO: 574 - RNA, 17 nt, Homo sapiens
gauaaaauaaaaugcua

SEQ ID NO: 575 - RNA, 17 nt, Homo sapiens
aaaaugcuaaacaacug

SEQ ID NO: 576 - RNA, 17 nt, Homo sapiens
gcuaaugcuuuugguac

SEQ ID NO: 577 - RNA, 17 nt, Homo sapiens
uuugguacaaauggaug

SEQ ID NO: 578 - RNA, 17 nt, Homo sapiens
auauuuucuuguuuaag

SEQ ID NO: 579 - RNA, 17 nt, Homo sapiens
aggggagcaugaagagg

SEQ ID NO: 580 - RNA, 17 nt, Homo sapiens
guuaugucaagcaucug

SEQ ID NO: 581 - RNA, 17 nt, Homo sapiens
ugucaagcaucuggcac

SEQ ID NO: 582 - RNA, 17 nt, Homo sapiens
caagcaucuggcacagc

SEQ ID NO: 583 - RNA, 17 nt, Homo sapiens
caucuggcacagcugaa

SEQ ID NO: 584 - RNA, 17 nt, Homo sapiens
ucuggcacagcugaagg

SEQ ID NO: 585 - RNA, 17 nt, Homo sapiens
ggcacagcugaaggcag

SEQ ID NO: 586 - RNA, 17 nt, Homo sapiens
cugaaggcagauggaaa

SEQ ID NO: 587 - RNA, 17 nt, Homo sapiens
auauuuacaaguacgca

SEQ ID NO: 588 - RNA, 17 nt, Homo sapiens
aaguacgcaauuugaga

SEQ ID NO: 589 - RNA, 17 nt, Homo sapiens
uuugagacuaagauauu

SEQ ID NO: 590 - RNA, 17 nt, Homo sapiens
uuguuaucauucuccua

SEQ ID NO: 591 - RNA, 17 nt, Homo sapiens
uaucauucuccuauuga

SEQ ID NO: 592 - RNA, 17 nt, Homo sapiens
ucauucuccuauugaag

SEQ ID NO: 593 - RNA, 17 nt, Homo sapiens
cauucuccuauugaaga

SEQ ID NO: 594 - RNA, 17 nt, Homo sapiens
uugaagacaagagcaau

SEQ ID NO: 595 - RNA, 17 nt, Homo sapiens
acaagagcaauaguaaa

SEQ ID NO: 596 - RNA, 17 nt, Homo sapiens
aguaaaacacaucaggu

SEQ ID NO: 597 - RNA, 17 nt, Homo sapiens
uaaaacacaucagguca

SEQ ID NO: 598 - RNA, 17 nt, Homo sapiens
aacacaucaggucaggg

SEQ ID NO: 599 - RNA, 17 nt, Homo sapiens
aucaggucaggggguua

SEQ ID NO: 600 - RNA, 17 nt, Homo sapiens
uuaaagaccugugauaa

SEQ ID NO: 601 - RNA, 17 nt, Homo sapiens
uaaagaccugugauaaa

SEQ ID NO: 602 - RNA, 17 nt, Homo sapiens
ugauaaaccacuuccga

SEQ ID NO: 603 - RNA, 17 nt, Homo sapiens
gauaaaccacuuccgau

SEQ ID NO: 604 - RNA, 17 nt, Homo sapiens
uaaaccacuuccgauaa

SEQ ID NO: 605 - RNA, 17 nt, Homo sapiens
accacuuccgauaaguu

SEQ ID NO: 606 - RNA, 17 nt, Homo sapiens
cgugugucuauauuuuc

SEQ ID NO: 607 - RNA, 17 nt, Homo sapiens
auauuuucauaucugua

SEQ ID NO: 608 - RNA, 17 nt, Homo sapiens
uucauaucuguauauau

SEQ ID NO: 609 - RNA, 17 nt, Homo sapiens
agaaagacaccuucgua

SEQ ID NO: 610 - RNA, 17 nt, Homo sapiens
aaagacaccuucguaac

SEQ ID NO: 611 - RNA, 17 nt, Homo sapiens
aagacaccuucguaacc

SEQ ID NO: 612 - RNA, 17 nt, Homo sapiens
uucguaacccgcauuuu

SEQ ID NO: 613 - RNA, 17 nt, Homo sapiens
ucguaacccgcauuuuc

SEQ ID NO: 614 - RNA, 17 nt, Homo sapiens
uaacccgcauuuuccaa

SEQ ID NO: 615 - RNA, 17 nt, Homo sapiens
gcauuuuccaaagagag

SEQ ID NO: 616 - RNA, 17 nt, Homo sapiens
cauuuuccaaagagagg

SEQ ID NO: 617 - RNA, 17 nt, Homo sapiens
gaggaaucacagggaga

SEQ ID NO: 618 - RNA, 17 nt, Homo sapiens
ggaaucacagggagaug

SEQ ID NO: 619 - RNA, 17 nt, Homo sapiens
agauguacagcaauggg

SEQ ID NO: 620 - RNA, 17 nt, Homo sapiens
uguacagcaauggggcc

SEQ ID NO: 621 - RNA, 17 nt, Homo sapiens
aauggggccauuuaaga

SEQ ID NO: 622 - RNA, 17 nt, Homo sapiens
auggggccauuuaagag

SEQ ID NO: 623 - RNA, 17 nt, Homo sapiens
aagaguucuguguucau

SEQ ID NO: 624 - RNA, 17 nt, Homo sapiens
cuguguucaucuugauu

SEQ ID NO: 625 - RNA, 17 nt, Homo sapiens
uguucaucuugauucuu

SEQ ID NO: 626 - RNA, 17 nt, Homo sapiens
cuugauucuucaccuuc

SEQ ID NO: 627 - RNA, 17 nt, Homo sapiens
gauucuucaccuucuag

SEQ ID NO: 628 - RNA, 17 nt, Homo sapiens
uucuucaccuucuagaa

SEQ ID NO: 629 - RNA, 17 nt, Homo sapiens
ucuucaccuucuagaag

SEQ ID NO: 630 - RNA, 17 nt, Homo sapiens
ucaccuucuagaagggg

SEQ ID NO: 631 - RNA, 17 nt, Homo sapiens
gaaggggcccugaguaa

SEQ ID NO: 632 - RNA, 17 nt, Homo sapiens
aaggggcccugaguaau

SEQ ID NO: 633 - RNA, 17 nt, Homo sapiens
aggggcccugaguaauu

SEQ ID NO: 634 - RNA, 17 nt, Homo sapiens
aguaauucacucauuca

SEQ ID NO: 635 - RNA, 17 nt, Homo sapiens
uaauucacucauucagc

SEQ ID NO: 636 - RNA, 17 nt, Homo sapiens
auucacucauucagcug

SEQ ID NO: 637 - RNA, 17 nt, Homo sapiens
acucauucagcugaaca

SEQ ID NO: 638 - RNA, 17 nt, Homo sapiens
cauucagcugaacaaca

SEQ ID NO: 639 - RNA, 17 nt, Homo sapiens
agcugaacaacaauggc

SEQ ID NO: 640 - RNA, 17 nt, Homo sapiens
ugaacaacaauggcuau

SEQ ID NO: 641 - RNA, 17 nt, Homo sapiens
acaauggcuaugaaggc

SEQ ID NO: 642 - RNA, 17 nt, Homo sapiens
augaaggcauugucguu

SEQ ID NO: 643 - RNA, 17 nt, Homo sapiens
gucguugcaaucgaccc

SEQ ID NO: 644 - RNA, 17 nt, Homo sapiens
caaucgaccccaaugug

SEQ ID NO: 645 - RNA, 17 nt, Homo sapiens
aaucgaccccaaugugc

SEQ ID NO: 646 - RNA, 17 nt, Homo sapiens
aucgaccccaaugugcc

SEQ ID NO: 647 - RNA, 17 nt, Homo sapiens
ucgaccccaaugugcca

SEQ ID NO: 648 - RNA, 17 nt, Homo sapiens
caaugugccagaagaug

SEQ ID NO: 649 - RNA, 17 nt, Homo sapiens
aaugugccagaagauga

SEQ ID NO: 650 - RNA, 17 nt, Homo sapiens
gaugaaacacucauuca

SEQ ID NO: 651 - RNA, 17 nt, Homo sapiens
ugaaacacucauucaac

SEQ ID NO: 652 - RNA, 17 nt, Homo sapiens
aaacacucauucaacaa

SEQ ID NO: 653 - RNA, 17 nt, Homo sapiens
acucauucaacaaauaa

SEQ ID NO: 654 - RNA, 17 nt, Homo sapiens
cauucaacaaauaaagg

SEQ ID NO: 655 - RNA, 17 nt, Homo sapiens
uaaaggacauggugacc

SEQ ID NO: 656 - RNA, 17 nt, Homo sapiens
auggugacccaggcauc

SEQ ID NO: 657 - RNA, 17 nt, Homo sapiens
uggugacccaggcaucu

SEQ ID NO: 658 - RNA, 17 nt, Homo sapiens
ggugacccaggcaucuc

SEQ ID NO: 659 - RNA, 17 nt, Homo sapiens
acccaggcaucucugua

SEQ ID NO: 660 - RNA, 17 nt, Homo sapiens
caggcaucucuguaucu

SEQ ID NO: 661 - RNA, 17 nt, Homo sapiens
ggcaucucuguaucugu

SEQ ID NO: 662 - RNA, 17 nt, Homo sapiens
ucuguaucuguuugaag

SEQ ID NO: 663 - RNA, 17 nt, Homo sapiens
uuugaagcuacaggaaa

SEQ ID NO: 664 - RNA, 17 nt, Homo sapiens
gaagcuacaggaaagcg

SEQ ID NO: 665 - RNA, 17 nt, Homo sapiens
uuuauuucaaaaauguu

SEQ ID NO: 666 - RNA, 17 nt, Homo sapiens
aauguugccauuuugau

SEQ ID NO: 667 - RNA, 17 nt, Homo sapiens
auguugccauuuugauu

SEQ ID NO: 668 - RNA, 17 nt, Homo sapiens
uuugauuccugaaacau

SEQ ID NO: 669 - RNA, 17 nt, Homo sapiens
uugauuccugaaacaug

SEQ ID NO: 670 - RNA, 17 nt, Homo sapiens
ccugaaacauggaagac

SEQ ID NO: 671 - RNA, 17 nt, Homo sapiens
uggaagacaaaggcuga

SEQ ID NO: 672 - RNA, 17 nt, Homo sapiens
acaaaggcugacuaugu

SEQ ID NO: 673 - RNA, 17 nt, Homo sapiens
aggcugacuaugugaga

SEQ ID NO: 674 - RNA, 17 nt, Homo sapiens
ugugagaccaaaacuug

SEQ ID NO: 675 - RNA, 17 nt, Homo sapiens
gugagaccaaaacuuga

SEQ ID NO: 676 - RNA, 17 nt, Homo sapiens
accaaaacuugagaccu

SEQ ID NO: 677 - RNA, 17 nt, Homo sapiens
cuugagaccuacaaaaa

SEQ ID NO: 678 - RNA, 17 nt, Homo sapiens
uugagaccuacaaaaau

SEQ ID NO: 679 - RNA, 17 nt, Homo sapiens
agaccuacaaaaaugcu

SEQ ID NO: 680 - RNA, 17 nt, Homo sapiens
aaaaaugcugauguucu

SEQ ID NO: 681 - RNA, 17 nt, Homo sapiens
ugauguucugguugcug

SEQ ID NO: 682 - RNA, 17 nt, Homo sapiens
cugguugcugagucuac

SEQ ID NO: 683 - RNA, 17 nt, Homo sapiens
gcugagucuacuccucc

SEQ ID NO: 684 - RNA, 17 nt, Homo sapiens
gagucuacuccuccagg

SEQ ID NO: 685 - RNA, 17 nt, Homo sapiens
gucuacuccuccaggua

SEQ ID NO: 686 - RNA, 17 nt, Homo sapiens
ucuacuccuccagguaa

SEQ ID NO: 687 - RNA, 17 nt, Homo sapiens
uacuccuccagguaaug

SEQ ID NO: 688 - RNA, 17 nt, Homo sapiens
acuccuccagguaauga

SEQ ID NO: 689 - RNA, 17 nt, Homo sapiens
ugaugaacccuacacug

SEQ ID NO: 690 - RNA, 17 nt, Homo sapiens
gaugaacccuacacuga

SEQ ID NO: 691 - RNA, 17 nt, Homo sapiens
augaacccuacacugag

SEQ ID NO: 692 - RNA, 17 nt, Homo sapiens
aacccuacacugagcag

SEQ ID NO: 693 - RNA, 17 nt, Homo sapiens
cccuacacugagcagau

SEQ ID NO: 694 - RNA, 17 nt, Homo sapiens
cacugagcagaugggca

SEQ ID NO: 695 - RNA, 17 nt, Homo sapiens
agaugggcaacugugga

SEQ ID NO: 696 - RNA, 17 nt, Homo sapiens
ugggcaacuguggagag

SEQ ID NO: 697 - RNA, 17 nt, Homo sapiens
aaaggauccaccucacu

SEQ ID NO: 698 - RNA, 17 nt, Homo sapiens
aaggauccaccucacuc

SEQ ID NO: 699 - RNA, 17 nt, Homo sapiens
ggauccaccucacuccu

SEQ ID NO: 700 - RNA, 17 nt, Homo sapiens
gauccaccucacuccug

SEQ ID NO: 701 - RNA, 17 nt, Homo sapiens
uccaccucacuccugau

SEQ ID NO: 702 - RNA, 17 nt, Homo sapiens
caccucacuccugauuu

SEQ ID NO: 703 - RNA, 17 nt, Homo sapiens
ccucacuccugauuuca

SEQ ID NO: 704 - RNA, 17 nt, Homo sapiens
cucacuccugauuucau

SEQ ID NO: 705 - RNA, 17 nt, Homo sapiens
cugauuucauugcagga

SEQ ID NO: 706 - RNA, 17 nt, Homo sapiens
uucauugcaggaaaaaa

SEQ ID NO: 707 - RNA, 17 nt, Homo sapiens
aaguuagcugaauaugg

SEQ ID NO: 708 - RNA, 17 nt, Homo sapiens
auauggaccacaaggua

SEQ ID NO: 709 - RNA, 17 nt, Homo sapiens
uauggaccacaagguaa

SEQ ID NO: 710 - RNA, 17 nt, Homo sapiens
uggaccacaagguaagg

SEQ ID NO: 711 - RNA, 17 nt, Homo sapiens
gguaaggcauuugucca

SEQ ID NO: 712 - RNA, 17 nt, Homo sapiens
cauuuguccaugagugg

SEQ ID NO: 713 - RNA, 17 nt, Homo sapiens
auuuguccaugaguggg

SEQ ID NO: 714 - RNA, 17 nt, Homo sapiens
gagugggcucaucuacg

SEQ ID NO: 715 - RNA, 17 nt, Homo sapiens
gugggcucaucuacgau

SEQ ID NO: 716 - RNA, 17 nt, Homo sapiens
ggcucaucuacgauggg

SEQ ID NO: 717 - RNA, 17 nt, Homo sapiens
acgaguacaauaaugau

SEQ ID NO: 718 - RNA, 17 nt, Homo sapiens
agaaauucuacuuaucc

SEQ ID NO: 719 - RNA, 17 nt, Homo sapiens
aauucuacuuauccaau

SEQ ID NO: 720 - RNA, 17 nt, Homo sapiens
uacuuauccaauggaag

SEQ ID NO: 721 - RNA, 17 nt, Homo sapiens
acuuauccaauggaaga

SEQ ID NO: 722 - RNA, 17 nt, Homo sapiens
aagaauacaagcaguaa

SEQ ID NO: 723 - RNA, 17 nt, Homo sapiens
auacaagcaguaagaug

SEQ ID NO: 724 - RNA, 17 nt, Homo sapiens
agauguucagcagguau

SEQ ID NO: 725 - RNA, 17 nt, Homo sapiens
uguucagcagguauuac

SEQ ID NO: 726 - RNA, 17 nt, Homo sapiens
gguauuacugguacaaa

SEQ ID NO: 727 - RNA, 17 nt, Homo sapiens
acugguacaaauguagu

SEQ ID NO: 728 - RNA, 17 nt, Homo sapiens
gaagugucagggaggca

SEQ ID NO: 729 - RNA, 17 nt, Homo sapiens
agggaggcagcuguuac

SEQ ID NO: 730 - RNA, 17 nt, Homo sapiens
gaggcagcuguuacacc

SEQ ID NO: 731 - RNA, 17 nt, Homo sapiens
gcuguuacaccaaaaga

SEQ ID NO: 732 - RNA, 17 nt, Homo sapiens
uguuacaccaaaagaug

SEQ ID NO: 733 - RNA, 17 nt, Homo sapiens
guuacaccaaaagaugc

SEQ ID NO: 734 - RNA, 17 nt, Homo sapiens
aaagaugcacauucaau

SEQ ID NO: 735 - RNA, 17 nt, Homo sapiens
agaugcacauucaauaa

SEQ ID NO: 736 - RNA, 17 nt, Homo sapiens
gcacauucaauaaaguu

SEQ ID NO: 737 - RNA, 17 nt, Homo sapiens
aaaguuacaggacucua

SEQ ID NO: 738 - RNA, 17 nt, Homo sapiens
uacaggacucuaugaaa

SEQ ID NO: 739 - RNA, 17 nt, Homo sapiens
caggacucuaugaaaaa

SEQ ID NO: 740 - RNA, 17 nt, Homo sapiens
guuuguucuccaauccc

SEQ ID NO: 741 - RNA, 17 nt, Homo sapiens
uuguucuccaaucccgc

SEQ ID NO: 742 - RNA, 17 nt, Homo sapiens
uguucuccaaucccgcc

SEQ ID NO: 743 - RNA, 17 nt, Homo sapiens
cuccaaucccgccagac

SEQ ID NO: 744 - RNA, 17 nt, Homo sapiens
uccaaucccgccagacg

SEQ ID NO: 745 - RNA, 17 nt, Homo sapiens
aaucccgccagacggag

SEQ ID NO: 746 - RNA, 17 nt, Homo sapiens
aucccgccagacggaga

SEQ ID NO: 747 - RNA, 17 nt, Homo sapiens
gagaaggcuucuauaau

SEQ ID NO: 748 - RNA, 17 nt, Homo sapiens
aaggcuucuauaauguu

SEQ ID NO: 749 - RNA, 17 nt, Homo sapiens
auguuugcacaacaugu

SEQ ID NO: 750 - RNA, 17 nt, Homo sapiens
guuugcacaacauguug

SEQ ID NO: 751 - RNA, 17 nt, Homo sapiens
ugcacaacauguugauu

SEQ ID NO: 752 - RNA, 17 nt, Homo sapiens
guugauucuauaguuga

SEQ ID NO: 753 - RNA, 17 nt, Homo sapiens
uugaauucuguacagaa

SEQ ID NO: 754 - RNA, 17 nt, Homo sapiens
uucuguacagaacaaaa

SEQ ID NO: 755 - RNA, 17 nt, Homo sapiens
uacagaacaaaaccaca

SEQ ID NO: 756 - RNA, 17 nt, Homo sapiens
aacaaaaccacaacaaa

SEQ ID NO: 757 - RNA, 17 nt, Homo sapiens
acaaaaccacaacaaag

SEQ ID NO: 758 - RNA, 17 nt, Homo sapiens
aaaaccacaacaaagaa

SEQ ID NO: 759 - RNA, 17 nt, Homo sapiens
accacaacaaagaagcu

SEQ ID NO: 760 - RNA, 17 nt, Homo sapiens
aaagaagcuccaaacaa

SEQ ID NO: 761 - RNA, 17 nt, Homo sapiens
agaagcuccaaacaagc

SEQ ID NO: 762 - RNA, 17 nt, Homo sapiens
gaagcuccaaacaagca

SEQ ID NO: 763 - RNA, 17 nt, Homo sapiens
cuccaaacaagcaaaau

SEQ ID NO: 764 - RNA, 17 nt, Homo sapiens
aaacaagcaaaaucaaa

SEQ ID NO: 765 - RNA, 17 nt, Homo sapiens
gcaaaaucaaaaaugca

SEQ ID NO: 766 - RNA, 17 nt, Homo sapiens
aaaaaugcaaucuccga

SEQ ID NO: 767 - RNA, 17 nt, Homo sapiens
augcaaucuccgaagca

SEQ ID NO: 768 - RNA, 17 nt, Homo sapiens
gcaaucuccgaagcaca

SEQ ID NO: 769 - RNA, 17 nt, Homo sapiens
uccgaagcacaugggaa

SEQ ID NO: 770 - RNA, 17 nt, Homo sapiens
cgaagcacaugggaagu

SEQ ID NO: 771 - RNA, 17 nt, Homo sapiens
aagugauccgugauucu

SEQ ID NO: 772 - RNA, 17 nt, Homo sapiens
cgugauucugaggacuu

SEQ ID NO: 773 - RNA, 17 nt, Homo sapiens
cugaggacuuuaagaaa

SEQ ID NO: 774 - RNA, 17 nt, Homo sapiens
aagaaaaccacuccuau

SEQ ID NO: 775 - RNA, 17 nt, Homo sapiens
agaaaaccacuccuaug

SEQ ID NO: 776 - RNA, 17 nt, Homo sapiens
aaaaccacuccuaugac

SEQ ID NO: 777 - RNA, 17 nt, Homo sapiens
aaccacuccuaugacaa

SEQ ID NO: 778 - RNA, 17 nt, Homo sapiens
accacuccuaugacaac

SEQ ID NO: 779 - RNA, 17 nt, Homo sapiens
ccuaugacaacacagcc

SEQ ID NO: 780 - RNA, 17 nt, Homo sapiens
augacaacacagccacc

SEQ ID NO: 781 - RNA, 17 nt, Homo sapiens
gacaacacagccaccaa

SEQ ID NO: 782 - RNA, 17 nt, Homo sapiens
aacacagccaccaaauc

SEQ ID NO: 783 - RNA, 17 nt, Homo sapiens
acacagccaccaaaucc

SEQ ID NO: 784 - RNA, 17 nt, Homo sapiens
acagccaccaaauccca

SEQ ID NO: 785 - RNA, 17 nt, Homo sapiens
cagccaccaaaucccac

SEQ ID NO: 786 - RNA, 17 nt, Homo sapiens
accaaaucccaccuucu

SEQ ID NO: 787 - RNA, 17 nt, Homo sapiens
ccaaaucccaccuucuc

SEQ ID NO: 788 - RNA, 17 nt, Homo sapiens
caaaucccaccuucuca

SEQ ID NO: 789 - RNA, 17 nt, Homo sapiens
aaucccaccuucucauu

SEQ ID NO: 790 - RNA, 17 nt, Homo sapiens
aucccaccuucucauug

SEQ ID NO: 791 - RNA, 17 nt, Homo sapiens
ccaccuucucauugcug

SEQ ID NO: 792 - RNA, 17 nt, Homo sapiens
accuucucauugcugca

SEQ ID NO: 793 - RNA, 17 nt, Homo sapiens
cucauugcugcagauug

SEQ ID NO: 794 - RNA, 17 nt, Homo sapiens
auugcugcagauuggac

SEQ ID NO: 795 - RNA, 17 nt, Homo sapiens
gauuggacaaagaauug

SEQ ID NO: 796 - RNA, 17 nt, Homo sapiens
guuuaguccuugacaaa

SEQ ID NO: 797 - RNA, 17 nt, Homo sapiens
uuuaguccuugacaaau

SEQ ID NO: 798 - RNA, 17 nt, Homo sapiens
uccuugacaaaucugga

SEQ ID NO: 799 - RNA, 17 nt, Homo sapiens
gacaaaucuggaagcau

SEQ ID NO: 800 - RNA, 17 nt, Homo sapiens
cuggaagcauggcgacu

SEQ ID NO: 801 - RNA, 17 nt, Homo sapiens
auggcgacugguaaccg

SEQ ID NO: 802 - RNA, 17 nt, Homo sapiens
cugguaaccgccucaau

SEQ ID NO: 803 - RNA, 17 nt, Homo sapiens
guaaccgccucaaucga

SEQ ID NO: 804 - RNA, 17 nt, Homo sapiens
uaaccgccucaaucgac

SEQ ID NO: 805 - RNA, 17 nt, Homo sapiens
accgccucaaucgacug

SEQ ID NO: 806 - RNA, 17 nt, Homo sapiens
caaucgacugaaucaag

SEQ ID NO: 807 - RNA, 17 nt, Homo sapiens
acugaaucaagcaggcc

SEQ ID NO: 808 - RNA, 17 nt, Homo sapiens
aaucaagcaggccagcu

SEQ ID NO: 809 - RNA, 17 nt, Homo sapiens
aagcaggccagcuuuuc

SEQ ID NO: 810 - RNA, 17 nt, Homo sapiens
agcaggccagcuuuucc

SEQ ID NO: 811 - RNA, 17 nt, Homo sapiens
aggccagcuuuuccugc

SEQ ID NO: 812 - RNA, 17 nt, Homo sapiens
agcuuuuccugcugcag

SEQ ID NO: 813 - RNA, 17 nt, Homo sapiens
gcuuuuccugcugcaga

SEQ ID NO: 814 - RNA, 17 nt, Homo sapiens
uuuccugcugcagacag

SEQ ID NO: 815 - RNA, 17 nt, Homo sapiens
ccugcugcagacaguug

SEQ ID NO: 816 - RNA, 17 nt, Homo sapiens
cugcagacaguugagcu

SEQ ID NO: 817 - RNA, 17 nt, Homo sapiens
aguugagcugggguccu

SEQ ID NO: 818 - RNA, 17 nt, Homo sapiens
cugggguccuggguugg

SEQ ID NO: 819 - RNA, 17 nt, Homo sapiens
ugggguccuggguuggg

SEQ ID NO: 820 - RNA, 17 nt, Homo sapiens
auggugacauuugacag

SEQ ID NO: 821 - RNA, 17 nt, Homo sapiens
cauuugacagugcugcc

SEQ ID NO: 822 - RNA, 17 nt, Homo sapiens
gacagugcugcccaugu

SEQ ID NO: 823 - RNA, 17 nt, Homo sapiens
agugcugcccauguaca

SEQ ID NO: 824 - RNA, 17 nt, Homo sapiens
gugcugcccauguacaa

SEQ ID NO: 825 - RNA, 17 nt, Homo sapiens
ugcugcccauguacaaa

SEQ ID NO: 826 - RNA, 17 nt, Homo sapiens
ccauguacaaagugaac

SEQ ID NO: 827 - RNA, 17 nt, Homo sapiens
aagugaacucauacaga

SEQ ID NO: 828 - RNA, 17 nt, Homo sapiens
gugaacucauacagaua

SEQ ID NO: 829 - RNA, 17 nt, Homo sapiens
acucauacagauaaaca

SEQ ID NO: 830 - RNA, 17 nt, Homo sapiens
agauaaacaguggcagu

SEQ ID NO: 831 - RNA, 17 nt, Homo sapiens
acaguggcagugacagg

SEQ ID NO: 832 - RNA, 17 nt, Homo sapiens
gcagugacagggacaca

SEQ ID NO: 833 - RNA, 17 nt, Homo sapiens
acagggacacacucgcc

SEQ ID NO: 834 - RNA, 17 nt, Homo sapiens
agggacacacucgccaa

SEQ ID NO: 835 - RNA, 17 nt, Homo sapiens
ggacacacucgccaaaa

SEQ ID NO: 836 - RNA, 17 nt, Homo sapiens
acacucgccaaaagauu

SEQ ID NO: 837 - RNA, 17 nt, Homo sapiens
cacucgccaaaagauua

SEQ ID NO: 838 - RNA, 17 nt, Homo sapiens
aagauuaccugcagcag

SEQ ID NO: 839 - RNA, 17 nt, Homo sapiens
agauuaccugcagcagc

SEQ ID NO: 840 - RNA, 17 nt, Homo sapiens
uuaccugcagcagcuuc

SEQ ID NO: 841 - RNA, 17 nt, Homo sapiens
ccugcagcagcuucagg

SEQ ID NO: 842 - RNA, 17 nt, Homo sapiens
gcagcagcuucaggagg

SEQ ID NO: 843 - RNA, 17 nt, Homo sapiens
gcagcuucaggagggac

SEQ ID NO: 844 - RNA, 17 nt, Homo sapiens
gggacguccaucugcag

SEQ ID NO: 845 - RNA, 17 nt, Homo sapiens
ggacguccaucugcagc

SEQ ID NO: 846 - RNA, 17 nt, Homo sapiens
cguccaucugcagcggg

SEQ ID NO: 847 - RNA, 17 nt, Homo sapiens
ccaucugcagcgggcuu

SEQ ID NO: 848 - RNA, 17 nt, Homo sapiens
cagcgggcuucgaucgg

SEQ ID NO: 849 - RNA, 17 nt, Homo sapiens
cgaucggcauuuacugu

SEQ ID NO: 850 - RNA, 17 nt, Homo sapiens
gcauuuacugugauuag

SEQ ID NO: 851 - RNA, 17 nt, Homo sapiens
gaaauauccaacugaug

SEQ ID NO: 852 - RNA, 17 nt, Homo sapiens
aaauauccaacugaugg

SEQ ID NO: 853 - RNA, 17 nt, Homo sapiens
uauccaacugauggauc

SEQ ID NO: 854 - RNA, 17 nt, Homo sapiens
gauggaucugaaauugu

SEQ ID NO: 855 - RNA, 17 nt, Homo sapiens
aauugugcugcugacgg

SEQ ID NO: 856 - RNA, 17 nt, Homo sapiens
ugugcugcugacggaug

SEQ ID NO: 857 - RNA, 17 nt, Homo sapiens
gggaagacaacacuaua

SEQ ID NO: 858 - RNA, 17 nt, Homo sapiens
aagacaacacuauaagu

SEQ ID NO: 859 - RNA, 17 nt, Homo sapiens
gacaacacuauaagugg

SEQ ID NO: 860 - RNA, 17 nt, Homo sapiens
gugggugcuuuaacgag

SEQ ID NO: 861 - RNA, 17 nt, Homo sapiens
acgaggucaaacaaagu

SEQ ID NO: 862 - RNA, 17 nt, Homo sapiens
ggucaaacaaaguggug

SEQ ID NO: 863 - RNA, 17 nt, Homo sapiens
aguggugccaucaucca

SEQ ID NO: 864 - RNA, 17 nt, Homo sapiens
guggugccaucauccac

SEQ ID NO: 865 - RNA, 17 nt, Homo sapiens
gugccaucauccacaca

SEQ ID NO: 866 - RNA, 17 nt, Homo sapiens
ccaucauccacacaguc

SEQ ID NO: 867 - RNA, 17 nt, Homo sapiens
caucauccacacagucg

SEQ ID NO: 868 - RNA, 17 nt, Homo sapiens
ucauccacacagucgcu

SEQ ID NO: 869 - RNA, 17 nt, Homo sapiens
auccacacagucgcuuu

SEQ ID NO: 870 - RNA, 17 nt, Homo sapiens
acagucgcuuuggggcc

SEQ ID NO: 871 - RNA, 17 nt, Homo sapiens
uuuggggcccucugcag

SEQ ID NO: 872 - RNA, 17 nt, Homo sapiens
uuggggcccucugcagc

SEQ ID NO: 873 - RNA, 17 nt, Homo sapiens
uggggcccucugcagcu

SEQ ID NO: 874 - RNA, 17 nt, Homo sapiens
gggcccucugcagcuca

SEQ ID NO: 875 - RNA, 17 nt, Homo sapiens
cccucugcagcucaaga

SEQ ID NO: 876 - RNA, 17 nt, Homo sapiens
ucugcagcucaagaacu

SEQ ID NO: 877 - RNA, 17 nt, Homo sapiens
ugcagcucaagaacuag

SEQ ID NO: 878 - RNA, 17 nt, Homo sapiens
ucaagaacuagaggagc

SEQ ID NO: 879 - RNA, 17 nt, Homo sapiens
agaggagcuguccaaaa

SEQ ID NO: 880 - RNA, 17 nt, Homo sapiens
gagcuguccaaaaugac

SEQ ID NO: 881 - RNA, 17 nt, Homo sapiens
agcuguccaaaaugaca

SEQ ID NO: 882 - RNA, 17 nt, Homo sapiens
aaaaugacaggagguuu

SEQ ID NO: 883 - RNA, 17 nt, Homo sapiens
agguuuacagacauaug

SEQ ID NO: 884 - RNA, 17 nt, Homo sapiens
uuacagacauaugcuuc

SEQ ID NO: 885 - RNA, 17 nt, Homo sapiens
acauaugcuucagauca

SEQ ID NO: 886 - RNA, 17 nt, Homo sapiens
uaugcuucagaucaagu

SEQ ID NO: 887 - RNA, 17 nt, Homo sapiens
uucagaucaaguucaga

SEQ ID NO: 888 - RNA, 17 nt, Homo sapiens
ucaaguucagaacaaug

SEQ ID NO: 889 - RNA, 17 nt, Homo sapiens
uucagaacaauggccuc

SEQ ID NO: 890 - RNA, 17 nt, Homo sapiens
acaauggccucauugau

SEQ ID NO: 891 - RNA, 17 nt, Homo sapiens
caauggccucauugaug

SEQ ID NO: 892 - RNA, 17 nt, Homo sapiens
auggccucauugaugcu

SEQ ID NO: 893 - RNA, 17 nt, Homo sapiens
auugaugcuuuuggggc

SEQ ID NO: 894 - RNA, 17 nt, Homo sapiens
uuuggggcccuuucauc

SEQ ID NO: 895 - RNA, 17 nt, Homo sapiens
uuggggcccuuucauca

SEQ ID NO: 896 - RNA, 17 nt, Homo sapiens
uggggcccuuucaucag

SEQ ID NO: 897 - RNA, 17 nt, Homo sapiens
gcccuuucaucaggaaa

SEQ ID NO: 898 - RNA, 17 nt, Homo sapiens
cuuucaucaggaaaugg

SEQ ID NO: 899 - RNA, 17 nt, Homo sapiens
aauggagcugucucuca

SEQ ID NO: 900 - RNA, 17 nt, Homo sapiens
gagcugucucucagcgc

SEQ ID NO: 901 - RNA, 17 nt, Homo sapiens
gcugucucucagcgcuc

SEQ ID NO: 902 - RNA, 17 nt, Homo sapiens
ugucucucagcgcucca

SEQ ID NO: 903 - RNA, 17 nt, Homo sapiens
cucagcgcuccauccag

SEQ ID NO: 904 - RNA, 17 nt, Homo sapiens
cagcgcuccauccagcu

SEQ ID NO: 905 - RNA, 17 nt, Homo sapiens
agcgcuccauccagcuu

SEQ ID NO: 906 - RNA, 17 nt, Homo sapiens
gcuccauccagcuugag

SEQ ID NO: 907 - RNA, 17 nt, Homo sapiens
cuccauccagcuugaga

SEQ ID NO: 908 - RNA, 17 nt, Homo sapiens
cauccagcuugagagua

SEQ ID NO: 909 - RNA, 17 nt, Homo sapiens
ggauuaacccuccagaa

SEQ ID NO: 910 - RNA, 17 nt, Homo sapiens
gauuaacccuccagaac

SEQ ID NO: 911 - RNA, 17 nt, Homo sapiens
auuaacccuccagaaca

SEQ ID NO: 912 - RNA, 17 nt, Homo sapiens
uaacccuccagaacagc

SEQ ID NO: 913 - RNA, 17 nt, Homo sapiens
aacccuccagaacagcc

SEQ ID NO: 914 - RNA, 17 nt, Homo sapiens
uccagaacagccagugg

SEQ ID NO: 915 - RNA, 17 nt, Homo sapiens
agaacagccaguggaug

SEQ ID NO: 916 - RNA, 17 nt, Homo sapiens
gaacagccaguggauga

SEQ ID NO: 917 - RNA, 17 nt, Homo sapiens
ugaauggcacagugauc

SEQ ID NO: 918 - RNA, 17 nt, Homo sapiens
aauggcacagugaucgu

SEQ ID NO: 919 - RNA, 17 nt, Homo sapiens
ucguggacagcaccgug

SEQ ID NO: 920 - RNA, 17 nt, Homo sapiens
uggacagcaccguggga

SEQ ID NO: 921 - RNA, 17 nt, Homo sapiens
gacagcaccgugggaaa

SEQ ID NO: 922 - RNA, 17 nt, Homo sapiens
gaaaggacacuuuguuu

SEQ ID NO: 923 - RNA, 17 nt, Homo sapiens
aaggacacuuuguuucu

SEQ ID NO: 924 - RNA, 17 nt, Homo sapiens
uuuguuucuuaucaccu

SEQ ID NO: 925 - RNA, 17 nt, Homo sapiens
uucuuaucaccuggaca

SEQ ID NO: 926 - RNA, 17 nt, Homo sapiens
cuuaucaccuggacaac

SEQ ID NO: 927 - RNA, 17 nt, Homo sapiens
uuaucaccuggacaacg

SEQ ID NO: 928 - RNA, 17 nt, Homo sapiens
accuggacaacgcagcc

SEQ ID NO: 929 - RNA, 17 nt, Homo sapiens
gacaacgcagccucccc

SEQ ID NO: 930 - RNA, 17 nt, Homo sapiens
aacgcagccuccccaaa

SEQ ID NO: 931 - RNA, 17 nt, Homo sapiens
acgcagccuccccaaau

SEQ ID NO: 932 - RNA, 17 nt, Homo sapiens
gcagccuccccaaaucc

SEQ ID NO: 933 - RNA, 17 nt, Homo sapiens
cagccuccccaaauccu

SEQ ID NO: 934 - RNA, 17 nt, Homo sapiens
agccuccccaaauccuu

SEQ ID NO: 935 - RNA, 17 nt, Homo sapiens
gccuccccaaauccuuc

SEQ ID NO: 936 - RNA, 17 nt, Homo sapiens
cccaaauccuucucugg

SEQ ID NO: 937 - RNA, 17 nt, Homo sapiens
ccaaauccuucucuggg

SEQ ID NO: 938 - RNA, 17 nt, Homo sapiens
aauccuucucugggauc

SEQ ID NO: 939 - RNA, 17 nt, Homo sapiens
uccuucucugggauccc

SEQ ID NO: 940 - RNA, 17 nt, Homo sapiens
cugggaucccaguggac

SEQ ID NO: 941 - RNA, 17 nt, Homo sapiens
ugggaucccaguggaca

SEQ ID NO: 942 - RNA, 17 nt, Homo sapiens
gggaucccaguggacag

SEQ ID NO: 943 - RNA, 17 nt, Homo sapiens
caguggacagaagcaag

SEQ ID NO: 944 - RNA, 17 nt, Homo sapiens
acagaagcaagguggcu

SEQ ID NO: 945 - RNA, 17 nt, Homo sapiens
aagguggcuuuguagug

SEQ ID NO: 946 - RNA, 17 nt, Homo sapiens
uaguggacaaaaacacc

SEQ ID NO: 947 - RNA, 17 nt, Homo sapiens
acaaaaacaccaaaaug

SEQ ID NO: 948 - RNA, 17 nt, Homo sapiens
aaaaacaccaaaauggc

SEQ ID NO: 949 - RNA, 17 nt, Homo sapiens
aaaacaccaaaauggcc

SEQ ID NO: 950 - RNA, 17 nt, Homo sapiens
aaaauggccuaccucca

SEQ ID NO: 951 - RNA, 17 nt, Homo sapiens
aaauggccuaccuccaa

SEQ ID NO: 952 - RNA, 17 nt, Homo sapiens
uggccuaccuccaaauc

SEQ ID NO: 953 - RNA, 17 nt, Homo sapiens
ggccuaccuccaaaucc

SEQ ID NO: 954 - RNA, 17 nt, Homo sapiens
ccuaccuccaaauccca

SEQ ID NO: 955 - RNA, 17 nt, Homo sapiens
cuaccuccaaaucccag

SEQ ID NO: 956 - RNA, 17 nt, Homo sapiens
uccaaaucccaggcauu

SEQ ID NO: 957 - RNA, 17 nt, Homo sapiens
ccaaaucccaggcauug

SEQ ID NO: 958 - RNA, 17 nt, Homo sapiens
caaaucccaggcauugc

SEQ ID NO: 959 - RNA, 17 nt, Homo sapiens
ucccaggcauugcuaag

SEQ ID NO: 960 - RNA, 17 nt, Homo sapiens
ggcauugcuaagguugg

SEQ ID NO: 961 - RNA, 17 nt, Homo sapiens
agguuggcacuuggaaa

SEQ ID NO: 962 - RNA, 17 nt, Homo sapiens
guuggcacuuggaaaua

SEQ ID NO: 963 - RNA, 17 nt, Homo sapiens
ggaaauacagucugcaa

SEQ ID NO: 964 - RNA, 17 nt, Homo sapiens
auacagucugcaagcaa

SEQ ID NO: 965 - RNA, 17 nt, Homo sapiens
cagucugcaagcaagcu

SEQ ID NO: 966 - RNA, 17 nt, Homo sapiens
cugcaagcaagcucaca

SEQ ID NO: 967 - RNA, 17 nt, Homo sapiens
aagcaagcucacaaacc

SEQ ID NO: 968 - RNA, 17 nt, Homo sapiens
gcaagcucacaaaccuu

SEQ ID NO: 969 - RNA, 17 nt, Homo sapiens
aagcucacaaaccuuga

SEQ ID NO: 970 - RNA, 17 nt, Homo sapiens
ucacaaaccuugacccu

SEQ ID NO: 971 - RNA, 17 nt, Homo sapiens
cacaaaccuugacccug

SEQ ID NO: 972 - RNA, 17 nt, Homo sapiens
accuugacccugacugu

SEQ ID NO: 973 - RNA, 17 nt, Homo sapiens
ccuugacccugacuguc

SEQ ID NO: 974 - RNA, 17 nt, Homo sapiens
cuugacccugacuguca

SEQ ID NO: 975 - RNA, 17 nt, Homo sapiens
acccugacugucacguc

SEQ ID NO: 976 - RNA, 17 nt, Homo sapiens
ugacugucacgucccgu

SEQ ID NO: 977 - RNA, 17 nt, Homo sapiens
gucacgucccgugcguc

SEQ ID NO: 978 - RNA, 17 nt, Homo sapiens
ucacgucccgugcgucc

SEQ ID NO: 979 - RNA, 17 nt, Homo sapiens
cgugcguccaaugcuac

SEQ ID NO: 980 - RNA, 17 nt, Homo sapiens
gugcguccaaugcuacc

SEQ ID NO: 981 - RNA, 17 nt, Homo sapiens
uccaaugcuacccugcc

SEQ ID NO: 982 - RNA, 17 nt, Homo sapiens
aaugcuacccugccucc

SEQ ID NO: 983 - RNA, 17 nt, Homo sapiens
augcuacccugccucca

SEQ ID NO: 984 - RNA, 17 nt, Homo sapiens
ugcuacccugccuccaa

SEQ ID NO: 985 - RNA, 17 nt, Homo sapiens
uacccugccuccaauua

SEQ ID NO: 986 - RNA, 17 nt, Homo sapiens
acccugccuccaauuac

SEQ ID NO: 987 - RNA, 17 nt, Homo sapiens
ccugccuccaauuacag

SEQ ID NO: 988 - RNA, 17 nt, Homo sapiens
cugccuccaauuacagu

SEQ ID NO: 989 - RNA, 17 nt, Homo sapiens
ccaauuacagugacuuc

SEQ ID NO: 990 - RNA, 17 nt, Homo sapiens
acagugacuuccaaaac

SEQ ID NO: 991 - RNA, 17 nt, Homo sapiens
gugacuuccaaaacgaa

SEQ ID NO: 992 - RNA, 17 nt, Homo sapiens
ugacuuccaaaacgaac

SEQ ID NO: 993 - RNA, 17 nt, Homo sapiens
aaacgaacaaggacacc

SEQ ID NO: 994 - RNA, 17 nt, Homo sapiens
acaaggacaccagcaaa

SEQ ID NO: 995 - RNA, 17 nt, Homo sapiens
aaggacaccagcaaauu

SEQ ID NO: 996 - RNA, 17 nt, Homo sapiens
aggacaccagcaaauuc

SEQ ID NO: 997 - RNA, 17 nt, Homo sapiens
acaccagcaaauucccc

SEQ ID NO: 998 - RNA, 17 nt, Homo sapiens
gcaaauuccccagcccu

SEQ ID NO: 999 - RNA, 17 nt, Homo sapiens
caaauuccccagcccuc

SEQ ID NO: 1000 - RNA, 17 nt, Homo sapiens
aaauuccccagcccucu

SEQ ID NO: 1001 - RNA, 17 nt, Homo sapiens
aauuccccagcccucug

SEQ ID NO: 1002 - RNA, 17 nt, Homo sapiens
uccccagcccucuggua

SEQ ID NO: 1003 - RNA, 17 nt, Homo sapiens
ccccagcccucugguag

SEQ ID NO: 1004 - RNA, 17 nt, Homo sapiens
cccagcccucugguagu

SEQ ID NO: 1005 - RNA, 17 nt, Homo sapiens
cagcccucugguaguuu

SEQ ID NO: 1006 - RNA, 17 nt, Homo sapiens
guuuaugcaaauauucg

SEQ ID NO: 1007 - RNA, 17 nt, Homo sapiens
auauucgccaaggagcc

SEQ ID NO: 1008 - RNA, 17 nt, Homo sapiens
uauucgccaaggagccu

SEQ ID NO: 1009 - RNA, 17 nt, Homo sapiens
caaggagccuccccaau

SEQ ID NO: 1010 - RNA, 17 nt, Homo sapiens
aaggagccuccccaauu

SEQ ID NO: 1011 - RNA, 17 nt, Homo sapiens
ggagccuccccaauucu

SEQ ID NO: 1012 - RNA, 17 nt, Homo sapiens
gagccuccccaauucuc

SEQ ID NO: 1013 - RNA, 17 nt, Homo sapiens
agccuccccaauucuca

SEQ ID NO: 1014 - RNA, 17 nt, Homo sapiens
gccuccccaauucucag

SEQ ID NO: 1015 - RNA, 17 nt, Homo sapiens
cccaauucucagggcca

SEQ ID NO: 1016 - RNA, 17 nt, Homo sapiens
caauucucagggccagu

SEQ ID NO: 1017 - RNA, 17 nt, Homo sapiens
cucagggccagugucac

SEQ ID NO: 1018 - RNA, 17 nt, Homo sapiens
ucagggccagugucaca

SEQ ID NO: 1019 - RNA, 17 nt, Homo sapiens
ccagugucacagcccug

SEQ ID NO: 1020 - RNA, 17 nt, Homo sapiens
agugucacagcccugau

SEQ ID NO: 1021 - RNA, 17 nt, Homo sapiens
gucacagcccugauuga

SEQ ID NO: 1022 - RNA, 17 nt, Homo sapiens
ucacagcccugauugaa

SEQ ID NO: 1023 - RNA, 17 nt, Homo sapiens
cacagcccugauugaau

SEQ ID NO: 1024 - RNA, 17 nt, Homo sapiens
auugaaucagugaaugg

SEQ ID NO: 1025 - RNA, 17 nt, Homo sapiens
ggaaaaacaguuaccuu

SEQ ID NO: 1026 - RNA, 17 nt, Homo sapiens
acaguuaccuuggaacu

SEQ ID NO: 1027 - RNA, 17 nt, Homo sapiens
caguuaccuuggaacua

SEQ ID NO: 1028 - RNA, 17 nt, Homo sapiens
cuuggaacuacuggaua

SEQ ID NO: 1029 - RNA, 17 nt, Homo sapiens
ggaacuacuggauaaug

SEQ ID NO: 1030 - RNA, 17 nt, Homo sapiens
aauggagcaggugcuga

SEQ ID NO: 1031 - RNA, 17 nt, Homo sapiens
gcaggugcugaugcuac

SEQ ID NO: 1032 - RNA, 17 nt, Homo sapiens
gcugaugcuacuaagga

SEQ ID NO: 1033 - RNA, 17 nt, Homo sapiens
gaugcuacuaaggauga

SEQ ID NO: 1034 - RNA, 17 nt, Homo sapiens
acggugucuacucaagg

SEQ ID NO: 1035 - RNA, 17 nt, Homo sapiens
gugucuacucaagguau

SEQ ID NO: 1036 - RNA, 17 nt, Homo sapiens
gucuacucaagguauuu

SEQ ID NO: 1037 - RNA, 17 nt, Homo sapiens
gguauuucacaacuuau

SEQ ID NO: 1038 - RNA, 17 nt, Homo sapiens
uauuucacaacuuauga

SEQ ID NO: 1039 - RNA, 17 nt, Homo sapiens
uucacaacuuaugacac

SEQ ID NO: 1040 - RNA, 17 nt, Homo sapiens
cuuaugacacgaauggu

SEQ ID NO: 1041 - RNA, 17 nt, Homo sapiens
guagauacaguguaaaa

SEQ ID NO: 1042 - RNA, 17 nt, Homo sapiens
gugcgggcucugggagg

SEQ ID NO: 1043 - RNA, 17 nt, Homo sapiens
gcgggcucugggaggag

SEQ ID NO: 1044 - RNA, 17 nt, Homo sapiens
guuaacgcagccagacg

SEQ ID NO: 1045 - RNA, 17 nt, Homo sapiens
aacgcagccagacggag

SEQ ID NO: 1046 - RNA, 17 nt, Homo sapiens
acgcagccagacggaga

SEQ ID NO: 1047 - RNA, 17 nt, Homo sapiens
agugauaccccagcaga

SEQ ID NO: 1048 - RNA, 17 nt, Homo sapiens
gugauaccccagcagag

SEQ ID NO: 1049 - RNA, 17 nt, Homo sapiens
ugauaccccagcagagu

SEQ ID NO: 1050 - RNA, 17 nt, Homo sapiens
gauaccccagcagagug

SEQ ID NO: 1051 - RNA, 17 nt, Homo sapiens
accccagcagaguggag

SEQ ID NO: 1052 - RNA, 17 nt, Homo sapiens
aguggagcacuguacau

SEQ ID NO: 1053 - RNA, 17 nt, Homo sapiens
uggagcacuguacauac

SEQ ID NO: 1054 - RNA, 17 nt, Homo sapiens
cacuguacauaccuggc

SEQ ID NO: 1055 - RNA, 17 nt, Homo sapiens
guacauaccuggcugga

SEQ ID NO: 1056 - RNA, 17 nt, Homo sapiens
uacauaccuggcuggau

SEQ ID NO: 1057 - RNA, 17 nt, Homo sapiens
uaccuggcuggauugag

SEQ ID NO: 1058 - RNA, 17 nt, Homo sapiens
ugaaauacaauggaauc

SEQ ID NO: 1059 - RNA, 17 nt, Homo sapiens
auggaauccaccaagac

SEQ ID NO: 1060 - RNA, 17 nt, Homo sapiens
uggaauccaccaagacc

SEQ ID NO: 1061 - RNA, 17 nt, Homo sapiens
gaauccaccaagaccug

SEQ ID NO: 1062 - RNA, 17 nt, Homo sapiens
aauccaccaagaccuga

SEQ ID NO: 1063 - RNA, 17 nt, Homo sapiens
accaagaccugaaauua

SEQ ID NO: 1064 - RNA, 17 nt, Homo sapiens
ccaagaccugaaauuaa

SEQ ID NO: 1065 - RNA, 17 nt, Homo sapiens
ugauguucaacacaagc

SEQ ID NO: 1066 - RNA, 17 nt, Homo sapiens
uguucaacacaagcaag

SEQ ID NO: 1067 - RNA, 17 nt, Homo sapiens
uucaacacaagcaagug

SEQ ID NO: 1068 - RNA, 17 nt, Homo sapiens
acacaagcaaguguguu

SEQ ID NO: 1069 - RNA, 17 nt, Homo sapiens
uguguuucagcagaaca

SEQ ID NO: 1070 - RNA, 17 nt, Homo sapiens
guuucagcagaacaucc

SEQ ID NO: 1071 - RNA, 17 nt, Homo sapiens
agcagaacauccucggg

SEQ ID NO: 1072 - RNA, 17 nt, Homo sapiens
agaacauccucgggagg

SEQ ID NO: 1073 - RNA, 17 nt, Homo sapiens
gaacauccucgggaggc

SEQ ID NO: 1074 - RNA, 17 nt, Homo sapiens
cgggaggcucauuugug

SEQ ID NO: 1075 - RNA, 17 nt, Homo sapiens
ggaggcucauuuguggc

SEQ ID NO: 1076 - RNA, 17 nt, Homo sapiens
uuuguggcuucugaugu

SEQ ID NO: 1077 - RNA, 17 nt, Homo sapiens
guggcuucugauguccc

SEQ ID NO: 1078 - RNA, 17 nt, Homo sapiens
cugaugucccaaaugcu

SEQ ID NO: 1079 - RNA, 17 nt, Homo sapiens
ugaugucccaaaugcuc

SEQ ID NO: 1080 - RNA, 17 nt, Homo sapiens
gaugucccaaaugcucc

SEQ ID NO: 1081 - RNA, 17 nt, Homo sapiens
ccaaaugcucccauacc

SEQ ID NO: 1082 - RNA, 17 nt, Homo sapiens
aaaugcucccauaccug

SEQ ID NO: 1083 - RNA, 17 nt, Homo sapiens
aaugcucccauaccuga

SEQ ID NO: 1084 - RNA, 17 nt, Homo sapiens
augcucccauaccugau

SEQ ID NO: 1085 - RNA, 17 nt, Homo sapiens
ucccauaccugaucucu

SEQ ID NO: 1086 - RNA, 17 nt, Homo sapiens
cccauaccugaucucuu

SEQ ID NO: 1087 - RNA, 17 nt, Homo sapiens
accugaucucuucccac

SEQ ID NO: 1088 - RNA, 17 nt, Homo sapiens
cugaucucuucccaccu

SEQ ID NO: 1089 - RNA, 17 nt, Homo sapiens
aucucuucccaccuggc

SEQ ID NO: 1090 - RNA, 17 nt, Homo sapiens
ucucuucccaccuggcc

SEQ ID NO: 1091 - RNA, 17 nt, Homo sapiens
cucuucccaccuggcca

SEQ ID NO: 1092 - RNA, 17 nt, Homo sapiens
cuucccaccuggccaaa

SEQ ID NO: 1093 - RNA, 17 nt, Homo sapiens
uucccaccuggccaaau

SEQ ID NO: 1094 - RNA, 17 nt, Homo sapiens
caccuggccaaaucacc

SEQ ID NO: 1095 - RNA, 17 nt, Homo sapiens
accuggccaaaucaccg

SEQ ID NO: 1096 - RNA, 17 nt, Homo sapiens
gccaaaucaccgaccug

SEQ ID NO: 1097 - RNA, 17 nt, Homo sapiens
caaaucaccgaccugaa

SEQ ID NO: 1098 - RNA, 17 nt, Homo sapiens
ucaccgaccugaaggcg

SEQ ID NO: 1099 - RNA, 17 nt, Homo sapiens
caccgaccugaaggcgg

SEQ ID NO: 1100 - RNA, 17 nt, Homo sapiens
ggaaauucacgggggca

SEQ ID NO: 1101 - RNA, 17 nt, Homo sapiens
acgggggcagucucauu

SEQ ID NO: 1102 - RNA, 17 nt, Homo sapiens
gggcagucucauuaauc

SEQ ID NO: 1103 - RNA, 17 nt, Homo sapiens
gcagucucauuaaucug

SEQ ID NO: 1104 - RNA, 17 nt, Homo sapiens
cauuaaucugacuugga

SEQ ID NO: 1105 - RNA, 17 nt, Homo sapiens
aaucugacuuggacagc

SEQ ID NO: 1106 - RNA, 17 nt, Homo sapiens
acuuggacagcuccugg

SEQ ID NO: 1107 - RNA, 17 nt, Homo sapiens
uggacagcuccugggga

SEQ ID NO: 1108 - RNA, 17 nt, Homo sapiens
gacagcuccuggggaug

SEQ ID NO: 1109 - RNA, 17 nt, Homo sapiens
acagcuccuggggauga

SEQ ID NO: 1110 - RNA, 17 nt, Homo sapiens
auuaugaccauggaaca

SEQ ID NO: 1111 - RNA, 17 nt, Homo sapiens
uuaugaccauggaacag

SEQ ID NO: 1112 - RNA, 17 nt, Homo sapiens
cauggaacagcucacaa

SEQ ID NO: 1113 - RNA, 17 nt, Homo sapiens
ggaacagcucacaagua

SEQ ID NO: 1114 - RNA, 17 nt, Homo sapiens
aacagcucacaaguaua

SEQ ID NO: 1115 - RNA, 17 nt, Homo sapiens
cagcucacaaguauauc

SEQ ID NO: 1116 - RNA, 17 nt, Homo sapiens
aguauaucauucgaaua

SEQ ID NO: 1117 - RNA, 17 nt, Homo sapiens
auaaguacaaguauucu

SEQ ID NO: 1118 - RNA, 17 nt, Homo sapiens
aaguauucuugaucuca

SEQ ID NO: 1119 - RNA, 17 nt, Homo sapiens
ucuugaucucagagaca

SEQ ID NO: 1120 - RNA, 17 nt, Homo sapiens
uugaucucagagacaag

SEQ ID NO: 1121 - RNA, 17 nt, Homo sapiens
ucagagacaaguucaau

SEQ ID NO: 1122 - RNA, 17 nt, Homo sapiens
acaaguucaaugaaucu

SEQ ID NO: 1123 - RNA, 17 nt, Homo sapiens
aaugaaucucuucaagu

SEQ ID NO: 1124 - RNA, 17 nt, Homo sapiens
ugaaucucuucaaguga

SEQ ID NO: 1125 - RNA, 17 nt, Homo sapiens
aucucuucaagugaaua

SEQ ID NO: 1126 - RNA, 17 nt, Homo sapiens
gugaauacuacugcucu

SEQ ID NO: 1127 - RNA, 17 nt, Homo sapiens
aauacuacugcucucau

SEQ ID NO: 1128 - RNA, 17 nt, Homo sapiens
acuacugcucucauccc

SEQ ID NO: 1129 - RNA, 17 nt, Homo sapiens
uacugcucucaucccaa

SEQ ID NO: 1130 - RNA, 17 nt, Homo sapiens
cugcucucaucccaaag

SEQ ID NO: 1131 - RNA, 17 nt, Homo sapiens
cucucaucccaaaggaa

SEQ ID NO: 1132 - RNA, 17 nt, Homo sapiens
ucucaucccaaaggaag

SEQ ID NO: 1133 - RNA, 17 nt, Homo sapiens
cucaucccaaaggaagc

SEQ ID NO: 1134 - RNA, 17 nt, Homo sapiens
aaggaagccaacucuga

SEQ ID NO: 1135 - RNA, 17 nt, Homo sapiens
aggaagccaacucugag

SEQ ID NO: 1136 - RNA, 17 nt, Homo sapiens
aagccaacucugaggaa

SEQ ID NO: 1137 - RNA, 17 nt, Homo sapiens
gccaacucugaggaagu

SEQ ID NO: 1138 - RNA, 17 nt, Homo sapiens
aggaagucuuuuuguuu

SEQ ID NO: 1139 - RNA, 17 nt, Homo sapiens
guuuaaaccagaaaaca

SEQ ID NO: 1140 - RNA, 17 nt, Homo sapiens
uuuaaaccagaaaacau

SEQ ID NO: 1141 - RNA, 17 nt, Homo sapiens
cagaaaacauuacuuuu

SEQ ID NO: 1142 - RNA, 17 nt, Homo sapiens
aacauuacuuuugaaaa

SEQ ID NO: 1143 - RNA, 17 nt, Homo sapiens
aaaauggcacagaucuu

SEQ ID NO: 1144 - RNA, 17 nt, Homo sapiens
aauggcacagaucuuuu

SEQ ID NO: 1145 - RNA, 17 nt, Homo sapiens
cacagaucuuuucauug

SEQ ID NO: 1146 - RNA, 17 nt, Homo sapiens
aucuuuucauugcuauu

SEQ ID NO: 1147 - RNA, 17 nt, Homo sapiens
uucauugcuauucaggc

SEQ ID NO: 1148 - RNA, 17 nt, Homo sapiens
ugcuauucaggcuguug

SEQ ID NO: 1149 - RNA, 17 nt, Homo sapiens
auucaggcuguugauaa

SEQ ID NO: 1150 - RNA, 17 nt, Homo sapiens
ggucgaucugaaaucag

SEQ ID NO: 1151 - RNA, 17 nt, Homo sapiens
cugaaaucagaaauauc

SEQ ID NO: 1152 - RNA, 17 nt, Homo sapiens
gaaauauccaacauugc

SEQ ID NO: 1153 - RNA, 17 nt, Homo sapiens
aaauauccaacauugca

SEQ ID NO: 1154 - RNA, 17 nt, Homo sapiens
uauccaacauugcacga

SEQ ID NO: 1155 - RNA, 17 nt, Homo sapiens
aacauugcacgaguauc

SEQ ID NO: 1156 - RNA, 17 nt, Homo sapiens
cgaguaucuuuguuuau

SEQ ID NO: 1157 - RNA, 17 nt, Homo sapiens
guuuauuccuccacaga

SEQ ID NO: 1158 - RNA, 17 nt, Homo sapiens
uuuauuccuccacagac

SEQ ID NO: 1159 - RNA, 17 nt, Homo sapiens
uauuccuccacagacuc

SEQ ID NO: 1160 - RNA, 17 nt, Homo sapiens
auuccuccacagacucc

SEQ ID NO: 1161 - RNA, 17 nt, Homo sapiens
uccuccacagacuccgc

SEQ ID NO: 1162 - RNA, 17 nt, Homo sapiens
ccacagacuccgccaga

SEQ ID NO: 1163 - RNA, 17 nt, Homo sapiens
acagacuccgccagaga

SEQ ID NO: 1164 - RNA, 17 nt, Homo sapiens
gacuccgccagagacac

SEQ ID NO: 1165 - RNA, 17 nt, Homo sapiens
acuccgccagagacacc

SEQ ID NO: 1166 - RNA, 17 nt, Homo sapiens
ccagagacaccuagucc

SEQ ID NO: 1167 - RNA, 17 nt, Homo sapiens
agagacaccuaguccug

SEQ ID NO: 1168 - RNA, 17 nt, Homo sapiens
gagacaccuaguccuga

SEQ ID NO: 1169 - RNA, 17 nt, Homo sapiens
accuaguccugaugaaa

SEQ ID NO: 1170 - RNA, 17 nt, Homo sapiens
ccuaguccugaugaaac

SEQ ID NO: 1171 - RNA, 17 nt, Homo sapiens
gaaacgucugcuccuug

SEQ ID NO: 1172 - RNA, 17 nt, Homo sapiens
acgucugcuccuugucc

SEQ ID NO: 1173 - RNA, 17 nt, Homo sapiens
gucugcuccuuguccua

SEQ ID NO: 1174 - RNA, 17 nt, Homo sapiens
ucugcuccuuguccuaa

SEQ ID NO: 1175 - RNA, 17 nt, Homo sapiens
uccuuguccuaauauuc

SEQ ID NO: 1176 - RNA, 17 nt, Homo sapiens
ccuuguccuaauauuca

SEQ ID NO: 1177 - RNA, 17 nt, Homo sapiens
uaauauucauaucaaca

SEQ ID NO: 1178 - RNA, 17 nt, Homo sapiens
uucauaucaacagcacc

SEQ ID NO: 1179 - RNA, 17 nt, Homo sapiens
auaucaacagcaccauu

SEQ ID NO: 1180 - RNA, 17 nt, Homo sapiens
ucaacagcaccauuccu

SEQ ID NO: 1181 - RNA, 17 nt, Homo sapiens
aacagcaccauuccugg

SEQ ID NO: 1182 - RNA, 17 nt, Homo sapiens
acagcaccauuccuggc

SEQ ID NO: 1183 - RNA, 17 nt, Homo sapiens
caccauuccuggcauuc

SEQ ID NO: 1184 - RNA, 17 nt, Homo sapiens
accauuccuggcauuca

SEQ ID NO: 1185 - RNA, 17 nt, Homo sapiens
uuccuggcauucacauu

SEQ ID NO: 1186 - RNA, 17 nt, Homo sapiens
uggcauucacauuuuaa

SEQ ID NO: 1187 - RNA, 17 nt, Homo sapiens
gcauucacauuuuaaaa

SEQ ID NO: 1188 - RNA, 17 nt, Homo sapiens
aggagaacugcagcugu

SEQ ID NO: 1189 - RNA, 17 nt, Homo sapiens
agaacugcagcugucaa

SEQ ID NO: 1190 - RNA, 17 nt, Homo sapiens
acugcagcugucaauag

SEQ ID NO: 1191 - RNA, 17 nt, Homo sapiens
cagcugucaauagccua

SEQ ID NO: 1192 - RNA, 17 nt, Homo sapiens
ucaauagccuagggcug

SEQ ID NO: 1193 - RNA, 17 nt, Homo sapiens
caauagccuagggcuga

SEQ ID NO: 1194 - RNA, 17 nt, Homo sapiens
ccuagggcugaauuuuu

SEQ ID NO: 1195 - RNA, 17 nt, Homo sapiens
uuuuugucagauaaaua

SEQ ID NO: 1196 - RNA, 17 nt, Homo sapiens
aauaaaucauucauccu

SEQ ID NO: 1197 - RNA, 17 nt, Homo sapiens
aaucauucauccuuuuu

SEQ ID NO: 1198 - RNA, 17 nt, Homo sapiens
cauucauccuuuuuuug

SEQ ID NO: 1199 - RNA, 17 nt, Homo sapiens
auucauccuuuuuuuga

SEQ ID NO: 1200 - RNA, 17 nt, Homo sapiens
aaauuuucuaaaaugua

SEQ ID NO: 1201 - RNA, 17 nt, Homo sapiens
uuuuagacuuccuguag

SEQ ID NO: 1202 - RNA, 17 nt, Homo sapiens
uagacuuccuguagggg

SEQ ID NO: 1203 - RNA, 17 nt, Homo sapiens
agacuuccuguaggggg

SEQ ID NO: 1204 - RNA, 17 nt, Homo sapiens
cgauauacuaaauguau

SEQ ID NO: 1205 - RNA, 17 nt, Homo sapiens
uauaguacauuuauacu

SEQ ID NO: 1206 - RNA, 17 nt, Homo sapiens
auuuauacuaaauguau

SEQ ID NO: 1207 - RNA, 17 nt, Homo sapiens
auguauuccuguagggg

SEQ ID NO: 1208 - RNA, 17 nt, Homo sapiens
uguauuccuguaggggg

SEQ ID NO: 1209 - RNA, 17 nt, Homo sapiens
uaaaaugcuaaacaacu

SEQ ID NO: 1210 - RNA, 17 nt, Homo sapiens
ugcuaaacaacugggua

SEQ ID NO: 1211 - RNA, 17 nt, Homo sapiens
auauaauugaauauuuu

SEQ ID NO: 1212 - RNA, 17 nt, Homo sapiens
gggagcaugaagaggug

SEQ ID NO: 1213 - RNA, 17 nt, Homo sapiens
gagguguugagguuaug

SEQ ID NO: 1214 - RNA, 17 nt, Homo sapiens
gcacagcugaaggcaga

SEQ ID NO: 1215 - RNA, 17 nt, Homo sapiens
acaaguacgcaauuuga

SEQ ID NO: 1216 - RNA, 17 nt, Homo sapiens
cgcaauuugagacuaag

SEQ ID NO: 1217 - RNA, 17 nt, Homo sapiens
cuccuauugaagacaag

SEQ ID NO: 1218 - RNA, 17 nt, Homo sapiens
agaccugugauaaacca

SEQ ID NO: 1219 - RNA, 17 nt, Homo sapiens
ccacuuccgauaaguug

SEQ ID NO: 1220 - RNA, 17 nt, Homo sapiens
cguaacccgcauuuucc

SEQ ID NO: 1221 - RNA, 17 nt, Homo sapiens
uucaucuugauucuuca

SEQ ID NO: 1222 - RNA, 17 nt, Homo sapiens
ggggcccugaguaauuc

SEQ ID NO: 1223 - RNA, 17 nt, Homo sapiens
auucagcugaacaacaa

SEQ ID NO: 1224 - RNA, 17 nt, Homo sapiens
auggcuaugaaggcauu

SEQ ID NO: 1225 - RNA, 17 nt, Homo sapiens
uugucguugcaaucgac

SEQ ID NO: 1226 - RNA, 17 nt, Homo sapiens
uugcaaucgaccccaau

SEQ ID NO: 1227 - RNA, 17 nt, Homo sapiens
cccaaugugccagaaga

SEQ ID NO: 1228 - RNA, 17 nt, Homo sapiens
cagaagaugaaacacuc

SEQ ID NO: 1229 - RNA, 17 nt, Homo sapiens
gacauggugacccaggc

SEQ ID NO: 1230 - RNA, 17 nt, Homo sapiens
aucuguuugaagcuaca

SEQ ID NO: 1231 - RNA, 17 nt, Homo sapiens
aggaaagcgauuuuauu

SEQ ID NO: 1232 - RNA, 17 nt, Homo sapiens
aaaauguugccauuuug

SEQ ID NO: 1233 - RNA, 17 nt, Homo sapiens
gccauuuugauuccuga

SEQ ID NO: 1234 - RNA, 17 nt, Homo sapiens
ugauuccugaaacaugg

SEQ ID NO: 1235 - RNA, 17 nt, Homo sapiens
caaaggcugacuaugug

SEQ ID NO: 1236 - RNA, 17 nt, Homo sapiens
gacuaugugagaccaaa

SEQ ID NO: 1237 - RNA, 17 nt, Homo sapiens
caaaacuugagaccuac

SEQ ID NO: 1238 - RNA, 17 nt, Homo sapiens
acaaaaaugcugauguu

SEQ ID NO: 1239 - RNA, 17 nt, Homo sapiens
aaaaugcugauguucug

SEQ ID NO: 1240 - RNA, 17 nt, Homo sapiens
uucugguugcugagucu

SEQ ID NO: 1241 - RNA, 17 nt, Homo sapiens
ugguugcugagucuacu

SEQ ID NO: 1242 - RNA, 17 nt, Homo sapiens
cagguaaugaugaaccc

SEQ ID NO: 1243 - RNA, 17 nt, Homo sapiens
guaaugaugaacccuac

SEQ ID NO: 1244 - RNA, 17 nt, Homo sapiens
ccuacacugagcagaug

SEQ ID NO: 1245 - RNA, 17 nt, Homo sapiens
agaagggugaaaggauc

SEQ ID NO: 1246 - RNA, 17 nt, Homo sapiens
ucacuccugauuucauu

SEQ ID NO: 1247 - RNA, 17 nt, Homo sapiens
auuucauugcaggaaaa

SEQ ID NO: 1248 - RNA, 17 nt, Homo sapiens
aguuagcugaauaugga

SEQ ID NO: 1249 - RNA, 17 nt, Homo sapiens
uuguccaugagugggcu

SEQ ID NO: 1250 - RNA, 17 nt, Homo sapiens
ucaucuacgauggggag

SEQ ID NO: 1251 - RNA, 17 nt, Homo sapiens
gaguauuugacgaguac

SEQ ID NO: 1252 - RNA, 17 nt, Homo sapiens
uauuugacgaguacaau

SEQ ID NO: 1253 - RNA, 17 nt, Homo sapiens
acaauaaugaugagaaa

SEQ ID NO: 1254 - RNA, 17 nt, Homo sapiens
auaaugaugagaaauuc

SEQ ID NO: 1255 - RNA, 17 nt, Homo sapiens
caaaagaugcacauuca

SEQ ID NO: 1256 - RNA, 17 nt, Homo sapiens
gacucuaugaaaaagga

SEQ ID NO: 1257 - RNA, 17 nt, Homo sapiens
aaggaugugaguuuguu

SEQ ID NO: 1258 - RNA, 17 nt, Homo sapiens
ccaaucccgccagacgg

SEQ ID NO: 1259 - RNA, 17 nt, Homo sapiens
uaauguuugcacaacau

SEQ ID NO: 1260 - RNA, 17 nt, Homo sapiens
aacauguugauucuaua

SEQ ID NO: 1261 - RNA, 17 nt, Homo sapiens
cuauaguugaauucugu

SEQ ID NO: 1262 - RNA, 17 nt, Homo sapiens
ucaaaaaugcaaucucc

SEQ ID NO: 1263 - RNA, 17 nt, Homo sapiens
caaucuccgaagcacau

SEQ ID NO: 1264 - RNA, 17 nt, Homo sapiens
ugggaagugauccguga

SEQ ID NO: 1265 - RNA, 17 nt, Homo sapiens
ugauccgugauucugag

SEQ ID NO: 1266 - RNA, 17 nt, Homo sapiens
gugauucugaggacuuu

SEQ ID NO: 1267 - RNA, 17 nt, Homo sapiens
acuccuaugacaacaca

SEQ ID NO: 1268 - RNA, 17 nt, Homo sapiens
uucucauugcugcagau

SEQ ID NO: 1269 - RNA, 17 nt, Homo sapiens
ucauugcugcagauugg

SEQ ID NO: 1270 - RNA, 17 nt, Homo sapiens
uaguccuugacaaaucu

SEQ ID NO: 1271 - RNA, 17 nt, Homo sapiens
agcauggcgacugguaa

SEQ ID NO: 1272 - RNA, 17 nt, Homo sapiens
ugguaaccgccucaauc

SEQ ID NO: 1273 - RNA, 17 nt, Homo sapiens
ccucaaucgacugaauc

SEQ ID NO: 1274 - RNA, 17 nt, Homo sapiens
aaucgacugaaucaagc

SEQ ID NO: 1275 - RNA, 17 nt, Homo sapiens
cuuuuccugcugcagac

SEQ ID NO: 1276 - RNA, 17 nt, Homo sapiens
uuccugcugcagacagu

SEQ ID NO: 1277 - RNA, 17 nt, Homo sapiens
agacaguugagcugggg

SEQ ID NO: 1278 - RNA, 17 nt, Homo sapiens
gggauggugacauuuga

SEQ ID NO: 1279 - RNA, 17 nt, Homo sapiens
ugacauuugacagugcu

SEQ ID NO: 1280 - RNA, 17 nt, Homo sapiens
uugacagugcugcccau

SEQ ID NO: 1281 - RNA, 17 nt, Homo sapiens
acagugcugcccaugua

SEQ ID NO: 1282 - RNA, 17 nt, Homo sapiens
uacaaagugaacucaua

SEQ ID NO: 1283 - RNA, 17 nt, Homo sapiens
guggcagugacagggac

SEQ ID NO: 1284 - RNA, 17 nt, Homo sapiens
acacacucgccaaaaga

SEQ ID NO: 1285 - RNA, 17 nt, Homo sapiens
gauuaccugcagcagcu

SEQ ID NO: 1286 - RNA, 17 nt, Homo sapiens
guccaucugcagcgggc

SEQ ID NO: 1287 - RNA, 17 nt, Homo sapiens
cgggcuucgaucggcau

SEQ ID NO: 1288 - RNA, 17 nt, Homo sapiens
uuuacugugauuaggaa

SEQ ID NO: 1289 - RNA, 17 nt, Homo sapiens
auccaacugauggaucu

SEQ ID NO: 1290 - RNA, 17 nt, Homo sapiens
auggaucugaaauugug

SEQ ID NO: 1291 - RNA, 17 nt, Homo sapiens
gaaauugugcugcugac

SEQ ID NO: 1292 - RNA, 17 nt, Homo sapiens
auugugcugcugacgga

SEQ ID NO: 1293 - RNA, 17 nt, Homo sapiens
gugcugcugacggaugg

SEQ ID NO: 1294 - RNA, 17 nt, Homo sapiens
aagugggugcuuuaacg

SEQ ID NO: 1295 - RNA, 17 nt, Homo sapiens
gcuuuaacgaggucaaa

SEQ ID NO: 1296 - RNA, 17 nt, Homo sapiens
aaaguggugccaucauc

SEQ ID NO: 1297 - RNA, 17 nt, Homo sapiens
acacagucgcuuugggg

SEQ ID NO: 1298 - RNA, 17 nt, Homo sapiens
ggcccucugcagcucaa

SEQ ID NO: 1299 - RNA, 17 nt, Homo sapiens
uccaaaaugacaggagg

SEQ ID NO: 1300 - RNA, 17 nt, Homo sapiens
agacauaugcuucagau

SEQ ID NO: 1301 - RNA, 17 nt, Homo sapiens
gccucauugaugcuuuu

SEQ ID NO: 1302 - RNA, 17 nt, Homo sapiens
ucauugaugcuuuuggg

SEQ ID NO: 1303 - RNA, 17 nt, Homo sapiens
cucucagcgcuccaucc

SEQ ID NO: 1304 - RNA, 17 nt, Homo sapiens
uccagcuugagaguaag

SEQ ID NO: 1305 - RNA, 17 nt, Homo sapiens
caguggaugaauggcac

SEQ ID NO: 1306 - RNA, 17 nt, Homo sapiens
ggcacagugaucgugga

SEQ ID NO: 1307 - RNA, 17 nt, Homo sapiens
uggacaacgcagccucc

SEQ ID NO: 1308 - RNA, 17 nt, Homo sapiens
caggcauugcuaagguu

SEQ ID NO: 1309 - RNA, 17 nt, Homo sapiens
uacagucugcaagcaag

SEQ ID NO: 1310 - RNA, 17 nt, Homo sapiens
caaaccuugacccugac

SEQ ID NO: 1311 - RNA, 17 nt, Homo sapiens
uugacccugacugucac

SEQ ID NO: 1312 - RNA, 17 nt, Homo sapiens
cgucccgugcguccaau

SEQ ID NO: 1313 - RNA, 17 nt, Homo sapiens
cguccaaugcuacccug

SEQ ID NO: 1314 - RNA, 17 nt, Homo sapiens
gcuacccugccuccaau

SEQ ID NO: 1315 - RNA, 17 nt, Homo sapiens
auuacagugacuuccaa

SEQ ID NO: 1316 - RNA, 17 nt, Homo sapiens
uccaaaacgaacaagga

SEQ ID NO: 1317 - RNA, 17 nt, Homo sapiens
uaguuuaugcaaauauu

SEQ ID NO: 1318 - RNA, 17 nt, Homo sapiens
aaauauucgccaaggag

SEQ ID NO: 1319 - RNA, 17 nt, Homo sapiens
acagcccugauugaauc

SEQ ID NO: 1320 - RNA, 17 nt, Homo sapiens
cccugauugaaucagug

SEQ ID NO: 1321 - RNA, 17 nt, Homo sapiens
gaaucagugaauggaaa

SEQ ID NO: 1322 - RNA, 17 nt, Homo sapiens
gagcaggugcugaugcu

SEQ ID NO: 1323 - RNA, 17 nt, Homo sapiens
caggugcugaugcuacu

SEQ ID NO: 1324 - RNA, 17 nt, Homo sapiens
gugcugaugcuacuaag

SEQ ID NO: 1325 - RNA, 17 nt, Homo sapiens
cuaaggaugacgguguc

SEQ ID NO: 1326 - RNA, 17 nt, Homo sapiens
caacuuaugacacgaau

SEQ ID NO: 1327 - RNA, 17 nt, Homo sapiens
uaugacacgaaugguag

SEQ ID NO: 1328 - RNA, 17 nt, Homo sapiens
guaaaagugcgggcucu

SEQ ID NO: 1329 - RNA, 17 nt, Homo sapiens
gaguuaacgcagccaga

SEQ ID NO: 1330 - RNA, 17 nt, Homo sapiens
cggagagugauacccca

SEQ ID NO: 1331 - RNA, 17 nt, Homo sapiens
gcuggauugagaaugau

SEQ ID NO: 1332 - RNA, 17 nt, Homo sapiens
uugagaaugaugaaaua

SEQ ID NO: 1333 - RNA, 17 nt, Homo sapiens
agaaugaugaaauacaa

SEQ ID NO: 1334 - RNA, 17 nt, Homo sapiens
caagaccugaaauuaau

SEQ ID NO: 1335 - RNA, 17 nt, Homo sapiens
auaaggaugauguucaa

SEQ ID NO: 1336 - RNA, 17 nt, Homo sapiens
uggcuucugauguccca

SEQ ID NO: 1337 - RNA, 17 nt, Homo sapiens
ucccaaaugcucccaua

SEQ ID NO: 1338 - RNA, 17 nt, Homo sapiens
ccauaccugaucucuuc

SEQ ID NO: 1339 - RNA, 17 nt, Homo sapiens
aaaucaccgaccugaag

SEQ ID NO: 1340 - RNA, 17 nt, Homo sapiens
accgaccugaaggcgga

SEQ ID NO: 1341 - RNA, 17 nt, Homo sapiens
auuaaucugacuuggac

SEQ ID NO: 1342 - RNA, 17 nt, Homo sapiens
cuggggaugauuaugac

SEQ ID NO: 1343 - RNA, 17 nt, Homo sapiens
augauuaugaccaugga

SEQ ID NO: 1344 - RNA, 17 nt, Homo sapiens
uaucauucgaauaagua

SEQ ID NO: 1345 - RNA, 17 nt, Homo sapiens
guauucuugaucucaga

SEQ ID NO: 1346 - RNA, 17 nt, Homo sapiens
aguucaaugaaucucuu

SEQ ID NO: 1347 - RNA, 17 nt, Homo sapiens
cuucaagugaauacuac

SEQ ID NO: 1348 - RNA, 17 nt, Homo sapiens
auacuacugcucucauc

SEQ ID NO: 1349 - RNA, 17 nt, Homo sapiens
ccaacucugaggaaguc

SEQ ID NO: 1350 - RNA, 17 nt, Homo sapiens
uuacuuuugaaaauggc

SEQ ID NO: 1351 - RNA, 17 nt, Homo sapiens
uuuucauugcuauucag

SEQ ID NO: 1352 - RNA, 17 nt, Homo sapiens
aggcuguugauaagguc

SEQ ID NO: 1353 - RNA, 17 nt, Homo sapiens
auaaggucgaucugaaa

SEQ ID NO: 1354 - RNA, 17 nt, Homo sapiens
gucgaucugaaaucaga

SEQ ID NO: 1355 - RNA, 17 nt, Homo sapiens
ccaacauugcacgagua

SEQ ID NO: 1356 - RNA, 17 nt, Homo sapiens
cauugcacgaguaucuu

SEQ ID NO: 1357 - RNA, 17 nt, Homo sapiens
cagacuccgccagagac

SEQ ID NO: 1358 - RNA, 17 nt, Homo sapiens
cuaguccugaugaaacg

SEQ ID NO: 1359 - RNA, 17 nt, Homo sapiens
guccugaugaaacgucu

SEQ ID NO: 1360 - RNA, 17 nt, Homo sapiens
aaacgucugcuccuugu

SEQ ID NO: 1361 - RNA, 17 nt, Homo sapiens
ggagaacugcagcuguc

SEQ ID NO: 1362 - RNA, 17 nt, Homo sapiens
cuagggcugaauuuuug

SEQ ID NO: 1363 - RNA, 17 nt, Homo sapiens
cuuuuuuugauuauaaa

SEQ ID NO: 1364 - RNA, 17 nt, Homo sapiens
uagggggcgauauacua

SEQ ID NO: 1365 - RNA, 17 nt, Homo sapiens
uagggggcgauaaaaua

SEQ ID NO: 1366 - RNA, 17 nt, Homo sapiens
aauaaaaugcuaaacaa

SEQ ID NO: 1367 - RNA, 17 nt, Homo sapiens
aaauggauguggaauau

SEQ ID NO: 1368 - RNA, 17 nt, Homo sapiens
auuuucuuguuuaaggg

SEQ ID NO: 1369 - RNA, 17 nt, Homo sapiens
gaagagguguugagguu

SEQ ID NO: 1370 - RNA, 17 nt, Homo sapiens
gagguuaugucaagcau

SEQ ID NO: 1371 - RNA, 17 nt, Homo sapiens
aagauauuguuaucauu

SEQ ID NO: 1372 - RNA, 17 nt, Homo sapiens
aaagaccugugauaaac

SEQ ID NO: 1373 - RNA, 17 nt, Homo sapiens
ggaaacgugugucuaua

SEQ ID NO: 1374 - RNA, 17 nt, Homo sapiens
aaacgugugucuauauu

SEQ ID NO: 1375 - RNA, 17 nt, Homo sapiens
ucauaucuguauauaua

SEQ ID NO: 1376 - RNA, 17 nt, Homo sapiens
agggagauguacagcaa

SEQ ID NO: 1377 - RNA, 17 nt, Homo sapiens
agaguucuguguucauc

SEQ ID NO: 1378 - RNA, 17 nt, Homo sapiens
aguucuguguucaucuu

SEQ ID NO: 1379 - RNA, 17 nt, Homo sapiens
aaggcauugucguugca

SEQ ID NO: 1380 - RNA, 17 nt, Homo sapiens
accccaaugugccagaa

SEQ ID NO: 1381 - RNA, 17 nt, Homo sapiens
gcaucucuguaucuguu

SEQ ID NO: 1382 - RNA, 17 nt, Homo sapiens
cuguaucuguuugaagc

SEQ ID NO: 1383 - RNA, 17 nt, Homo sapiens
ucaaaaauguugccauu

SEQ ID NO: 1384 - RNA, 17 nt, Homo sapiens
cugacuaugugagacca

SEQ ID NO: 1385 - RNA, 17 nt, Homo sapiens
augcugauguucugguu

SEQ ID NO: 1386 - RNA, 17 nt, Homo sapiens
gggcaacuguggagaga

SEQ ID NO: 1387 - RNA, 17 nt, Homo sapiens
aggcauuuguccaugag

SEQ ID NO: 1388 - RNA, 17 nt, Homo sapiens
aguaagauguucagcag

SEQ ID NO: 1389 - RNA, 17 nt, Homo sapiens
guacaaauguaguaaag

SEQ ID NO: 1390 - RNA, 17 nt, Homo sapiens
aaagaagugucagggag

SEQ ID NO: 1391 - RNA, 17 nt, Homo sapiens
aggcagcuguuacacca

SEQ ID NO: 1392 - RNA, 17 nt, Homo sapiens
aaaaggaugugaguuug

SEQ ID NO: 1393 - RNA, 17 nt, Homo sapiens
gugaguuuguucuccaa

SEQ ID NO: 1394 - RNA, 17 nt, Homo sapiens
ucuauaauguuugcaca

SEQ ID NO: 1395 - RNA, 17 nt, Homo sapiens
cacaacauguugauucu

SEQ ID NO: 1396 - RNA, 17 nt, Homo sapiens
ugaauucuguacagaac

SEQ ID NO: 1397 - RNA, 17 nt, Homo sapiens
aaagaauuguguguuua

SEQ ID NO: 1398 - RNA, 17 nt, Homo sapiens
agaauuguguguuuagu

SEQ ID NO: 1399 - RNA, 17 nt, Homo sapiens
aauuguguguuuagucc

SEQ ID NO: 1400 - RNA, 17 nt, Homo sapiens
cugcccauguacaaagu

SEQ ID NO: 1401 - RNA, 17 nt, Homo sapiens
cauuuacugugauuagg

SEQ ID NO: 1402 - RNA, 17 nt, Homo sapiens
cugaaauugugcugcug

SEQ ID NO: 1403 - RNA, 17 nt, Homo sapiens
gaggagcuguccaaaau

SEQ ID NO: 1404 - RNA, 17 nt, Homo sapiens
auggagcugucucucag

SEQ ID NO: 1405 - RNA, 17 nt, Homo sapiens
gacacuuuguuucuuau

SEQ ID NO: 1406 - RNA, 17 nt, Homo sapiens
guggcuuuguaguggac

SEQ ID NO: 1407 - RNA, 17 nt, Homo sapiens
cccugacugucacgucc

SEQ ID NO: 1408 - RNA, 17 nt, Homo sapiens
gggccagugucacagcc

SEQ ID NO: 1409 - RNA, 17 nt, Homo sapiens
augacggugucuacuca

SEQ ID NO: 1410 - RNA, 17 nt, Homo sapiens
gauacaguguaaaagug

SEQ ID NO: 1411 - RNA, 17 nt, Homo sapiens
ggagcacuguacauacc

SEQ ID NO: 1412 - RNA, 17 nt, Homo sapiens
aggaugauguucaacac

SEQ ID NO: 1413 - RNA, 17 nt, Homo sapiens
aagcaaguguguuucag

SEQ ID NO: 1414 - RNA, 17 nt, Homo sapiens
gcaaguguguuucagca

SEQ ID NO: 1415 - RNA, 17 nt, Homo sapiens
gcucauuuguggcuucu

SEQ ID NO: 1416 - RNA, 17 nt, Homo sapiens
cuucugaugucccaaau

SEQ ID NO: 1417 - RNA, 17 nt, Homo sapiens
gucuuuuuguuuaaacc

SEQ ID NO: 1418 - RNA, 17 nt, Homo sapiens
uucaggcuguugauaag

SEQ ID NO: 1419 - RNA, 17 nt, Homo sapiens
guaucuuuguuuauucc

SEQ ID NO: 1420 - RNA, 17 nt, Homo sapiens
ugcuccuuguccuaaua

SEQ ID NO: 1421 - RNA, 17 nt, Homo sapiens
aaaauuauguggaagug

SEQ ID NO: 1422 - RNA, 17 nt, Homo sapiens
cugcagcugucaauagc

SEQ ID NO: 1423 - RNA, 17 nt, Homo sapiens
gaauuuuugucagauaa

SEQ ID NO: 1424 - RNA, 17 nt, Homo sapiens
ucuaaaauguauuuuag

SEQ ID NO: 1425 - RNA, 17 nt, Homo sapiens
gacuuccuguagggggc

SEQ ID NO: 1426 - RNA, 17 nt, Homo sapiens
uacuaaauguauauagu

SEQ ID NO: 1427 - RNA, 17 nt, Homo sapiens
uacuaaauguauuccug

SEQ ID NO: 1428 - RNA, 17 nt, Homo sapiens
guauuccuguagggggc

SEQ ID NO: 1429 - RNA, 17 nt, Homo sapiens
uacuaaauguauuuuag

SEQ ID NO: 1430 - RNA, 17 nt, Homo sapiens
ugcuuuugguacaaaug

SEQ ID NO: 1431 - RNA, 17 nt, Homo sapiens
uaaggggagcaugaaga

SEQ ID NO: 1432 - RNA, 17 nt, Homo sapiens
augaagagguguugagg

SEQ ID NO: 1433 - RNA, 17 nt, Homo sapiens
guguugagguuauguca

SEQ ID NO: 1434 - RNA, 17 nt, Homo sapiens
uaugucaagcaucuggc

SEQ ID NO: 1435 - RNA, 17 nt, Homo sapiens
agcaucuggcacagcug

SEQ ID NO: 1436 - RNA, 17 nt, Homo sapiens
cuggcacagcugaaggc

SEQ ID NO: 1437 - RNA, 17 nt, Homo sapiens
agcugaaggcagaugga

SEQ ID NO: 1438 - RNA, 17 nt, Homo sapiens
auuuacaaguacgcaau

SEQ ID NO: 1439 - RNA, 17 nt, Homo sapiens
agacaagagcaauagua

SEQ ID NO: 1440 - RNA, 17 nt, Homo sapiens
gagcaauaguaaaacac

SEQ ID NO: 1441 - RNA, 17 nt, Homo sapiens
cacaucaggucaggggg

SEQ ID NO: 1442 - RNA, 17 nt, Homo sapiens
gucaggggguuaaagac

SEQ ID NO: 1443 - RNA, 17 nt, Homo sapiens
uccgauaaguuggaaac

SEQ ID NO: 1444 - RNA, 17 nt, Homo sapiens
uuggaaacgugugucua

SEQ ID NO: 1445 - RNA, 17 nt, Homo sapiens
auauaaugguaaagaaa

SEQ ID NO: 1446 - RNA, 17 nt, Homo sapiens
acaccuucguaacccgc

SEQ ID NO: 1447 - RNA, 17 nt, Homo sapiens
gauguacagcaaugggg

SEQ ID NO: 1448 - RNA, 17 nt, Homo sapiens
gcaauggggccauuuaa

SEQ ID NO: 1449 - RNA, 17 nt, Homo sapiens
auuuaagaguucugugu

SEQ ID NO: 1450 - RNA, 17 nt, Homo sapiens
uagaaggggcccugagu

SEQ ID NO: 1451 - RNA, 17 nt, Homo sapiens
ggcccugaguaauucac

SEQ ID NO: 1452 - RNA, 17 nt, Homo sapiens
cucauucagcugaacaa

SEQ ID NO: 1453 - RNA, 17 nt, Homo sapiens
caacaauggcuaugaag

SEQ ID NO: 1454 - RNA, 17 nt, Homo sapiens
cuaugaaggcauugucg

SEQ ID NO: 1455 - RNA, 17 nt, Homo sapiens
gcauugucguugcaauc

SEQ ID NO: 1456 - RNA, 17 nt, Homo sapiens
aggacauggugacccag

SEQ ID NO: 1457 - RNA, 17 nt, Homo sapiens
ugacccaggcaucucug

SEQ ID NO: 1458 - RNA, 17 nt, Homo sapiens
uguuugaagcuacagga

SEQ ID NO: 1459 - RNA, 17 nt, Homo sapiens
acaggaaagcgauuuua

SEQ ID NO: 1460 - RNA, 17 nt, Homo sapiens
agacaaaggcugacuau

SEQ ID NO: 1461 - RNA, 17 nt, Homo sapiens
auguucugguugcugag

SEQ ID NO: 1462 - RNA, 17 nt, Homo sapiens
guugcugagucuacucc

SEQ ID NO: 1463 - RNA, 17 nt, Homo sapiens
uccuccagguaaugaug

SEQ ID NO: 1464 - RNA, 17 nt, Homo sapiens
uacacugagcagauggg

SEQ ID NO: 1465 - RNA, 17 nt, Homo sapiens
gcagaugggcaacugug

SEQ ID NO: 1466 - RNA, 17 nt, Homo sapiens
agagaagggugaaagga

SEQ ID NO: 1467 - RNA, 17 nt, Homo sapiens
ggaaaaaaguuagcuga

SEQ ID NO: 1468 - RNA, 17 nt, Homo sapiens
aaaaguuagcugaauau

SEQ ID NO: 1469 - RNA, 17 nt, Homo sapiens
accacaagguaaggcau

SEQ ID NO: 1470 - RNA, 17 nt, Homo sapiens
aagguaaggcauuuguc

SEQ ID NO: 1471 - RNA, 17 nt, Homo sapiens
guccaugagugggcuca

SEQ ID NO: 1472 - RNA, 17 nt, Homo sapiens
augagugggcucaucua

SEQ ID NO: 1473 - RNA, 17 nt, Homo sapiens
gauggggaguauuugac

SEQ ID NO: 1474 - RNA, 17 nt, Homo sapiens
uuugacgaguacaauaa

SEQ ID NO: 1475 - RNA, 17 nt, Homo sapiens
gaauacaagcaguaaga

SEQ ID NO: 1476 - RNA, 17 nt, Homo sapiens
uacaagcaguaagaugu

SEQ ID NO: 1477 - RNA, 17 nt, Homo sapiens
gauguucagcagguauu

SEQ ID NO: 1478 - RNA, 17 nt, Homo sapiens
uucagcagguauuacug

SEQ ID NO: 1479 - RNA, 17 nt, Homo sapiens
uauuacugguacaaaug

SEQ ID NO: 1480 - RNA, 17 nt, Homo sapiens
caaauguaguaaagaag

SEQ ID NO: 1481 - RNA, 17 nt, Homo sapiens
guaaagaagugucaggg

SEQ ID NO: 1482 - RNA, 17 nt, Homo sapiens
ucagggaggcagcuguu

SEQ ID NO: 1483 - RNA, 17 nt, Homo sapiens
gggaggcagcuguuaca

SEQ ID NO: 1484 - RNA, 17 nt, Homo sapiens
ucaauaaaguuacagga

SEQ ID NO: 1485 - RNA, 17 nt, Homo sapiens
ggaugugaguuuguucu

SEQ ID NO: 1486 - RNA, 17 nt, Homo sapiens
cggagaaggcuucuaua

SEQ ID NO: 1487 - RNA, 17 nt, Homo sapiens
auucuauaguugaauuc

SEQ ID NO: 1488 - RNA, 17 nt, Homo sapiens
acaaagaagcuccaaac

SEQ ID NO: 1489 - RNA, 17 nt, Homo sapiens
ccaaacaagcaaaauca

SEQ ID NO: 1490 - RNA, 17 nt, Homo sapiens
ucuccgaagcacauggg

SEQ ID NO: 1491 - RNA, 17 nt, Homo sapiens
caugggaagugauccgu

SEQ ID NO: 1492 - RNA, 17 nt, Homo sapiens
agugauccgugauucug

SEQ ID NO: 1493 - RNA, 17 nt, Homo sapiens
acaacacagccaccaaa

SEQ ID NO: 1494 - RNA, 17 nt, Homo sapiens
uguguuuaguccuugac

SEQ ID NO: 1495 - RNA, 17 nt, Homo sapiens
aucuggaagcauggcga

SEQ ID NO: 1496 - RNA, 17 nt, Homo sapiens
gaagcauggcgacuggu

SEQ ID NO: 1497 - RNA, 17 nt, Homo sapiens
ggcgacugguaaccgcc

SEQ ID NO: 1498 - RNA, 17 nt, Homo sapiens
ugaaucaagcaggccag

SEQ ID NO: 1499 - RNA, 17 nt, Homo sapiens
ucaagcaggccagcuuu

SEQ ID NO: 1500 - RNA, 17 nt, Homo sapiens
gcaggccagcuuuuccu

SEQ ID NO: 1501 - RNA, 17 nt, Homo sapiens
ugcagacaguugagcug

SEQ ID NO: 1502 - RNA, 17 nt, Homo sapiens
acaguugagcugggguc

SEQ ID NO: 1503 - RNA, 17 nt, Homo sapiens
gagcugggguccugggu

SEQ ID NO: 1504 - RNA, 17 nt, Homo sapiens
gguccuggguugggaug

SEQ ID NO: 1505 - RNA, 17 nt, Homo sapiens
uugggauggugacauuu

SEQ ID NO: 1506 - RNA, 17 nt, Homo sapiens
auuugacagugcugccc

SEQ ID NO: 1507 - RNA, 17 nt, Homo sapiens
uguacaaagugaacuca

SEQ ID NO: 1508 - RNA, 17 nt, Homo sapiens
gauaaacaguggcagug

SEQ ID NO: 1509 - RNA, 17 nt, Homo sapiens
aaacaguggcagugaca

SEQ ID NO: 1510 - RNA, 17 nt, Homo sapiens
caguggcagugacaggg

SEQ ID NO: 1511 - RNA, 17 nt, Homo sapiens
uaccugcagcagcuuca

SEQ ID NO: 1512 - RNA, 17 nt, Homo sapiens
cugcagcagcuucagga

SEQ ID NO: 1513 - RNA, 17 nt, Homo sapiens
ggagggacguccaucug

SEQ ID NO: 1514 - RNA, 17 nt, Homo sapiens
caucugcagcgggcuuc

SEQ ID NO: 1515 - RNA, 17 nt, Homo sapiens
ugcagcgggcuucgauc

SEQ ID NO: 1516 - RNA, 17 nt, Homo sapiens
uucgaucggcauuuacu

SEQ ID NO: 1517 - RNA, 17 nt, Homo sapiens
cacuauaagugggugcu

SEQ ID NO: 1518 - RNA, 17 nt, Homo sapiens
auaagugggugcuuuaa

SEQ ID NO: 1519 - RNA, 17 nt, Homo sapiens
uuaacgaggucaaacaa

SEQ ID NO: 1520 - RNA, 17 nt, Homo sapiens
caaacaaaguggugcca

SEQ ID NO: 1521 - RNA, 17 nt, Homo sapiens
acaaaguggugccauca

SEQ ID NO: 1522 - RNA, 17 nt, Homo sapiens
uccacacagucgcuuug

SEQ ID NO: 1523 - RNA, 17 nt, Homo sapiens
gcuuuggggcccucugc

SEQ ID NO: 1524 - RNA, 17 nt, Homo sapiens
ccucugcagcucaagaa

SEQ ID NO: 1525 - RNA, 17 nt, Homo sapiens
cuagaggagcuguccaa

SEQ ID NO: 1526 - RNA, 17 nt, Homo sapiens
gacaggagguuuacaga

SEQ ID NO: 1527 - RNA, 17 nt, Homo sapiens
cagaucaaguucagaac

SEQ ID NO: 1528 - RNA, 17 nt, Homo sapiens
gaacaauggccucauug

SEQ ID NO: 1529 - RNA, 17 nt, Homo sapiens
cuuuuggggcccuuuca

SEQ ID NO: 1530 - RNA, 17 nt, Homo sapiens
gaaauggagcugucucu

SEQ ID NO: 1531 - RNA, 17 nt, Homo sapiens
gucucucagcgcuccau

SEQ ID NO: 1532 - RNA, 17 nt, Homo sapiens
uccauccagcuugagag

SEQ ID NO: 1533 - RNA, 17 nt, Homo sapiens
gcuugagaguaagggau

SEQ ID NO: 1534 - RNA, 17 nt, Homo sapiens
ccagaacagccagugga

SEQ ID NO: 1535 - RNA, 17 nt, Homo sapiens
aacagccaguggaugaa

SEQ ID NO: 1536 - RNA, 17 nt, Homo sapiens
gaugaauggcacaguga

SEQ ID NO: 1537 - RNA, 17 nt, Homo sapiens
auggcacagugaucgug

SEQ ID NO: 1538 - RNA, 17 nt, Homo sapiens
cagugaucguggacagc

SEQ ID NO: 1539 - RNA, 17 nt, Homo sapiens
cguggacagcaccgugg

SEQ ID NO: 1540 - RNA, 17 nt, Homo sapiens
acagcaccgugggaaag

SEQ ID NO: 1541 - RNA, 17 nt, Homo sapiens
acaacgcagccucccca

SEQ ID NO: 1542 - RNA, 17 nt, Homo sapiens
ggaucccaguggacaga

SEQ ID NO: 1543 - RNA, 17 nt, Homo sapiens
ggacagaagcaaggugg

SEQ ID NO: 1544 - RNA, 17 nt, Homo sapiens
gaagcaagguggcuuug

SEQ ID NO: 1545 - RNA, 17 nt, Homo sapiens
gcaagguggcuuuguag

SEQ ID NO: 1546 - RNA, 17 nt, Homo sapiens
gcuuuguaguggacaaa

SEQ ID NO: 1547 - RNA, 17 nt, Homo sapiens
ccaaaauggccuaccuc

SEQ ID NO: 1548 - RNA, 17 nt, Homo sapiens
aaucccaggcauugcua

SEQ ID NO: 1549 - RNA, 17 nt, Homo sapiens
uugcuaagguuggcacu

SEQ ID NO: 1550 - RNA, 17 nt, Homo sapiens
uaagguuggcacuugga

SEQ ID NO: 1551 - RNA, 17 nt, Homo sapiens
gaaauacagucugcaag

SEQ ID NO: 1552 - RNA, 17 nt, Homo sapiens
gucugcaagcaagcuca

SEQ ID NO: 1553 - RNA, 17 nt, Homo sapiens
gcaagcaagcucacaaa

SEQ ID NO: 1554 - RNA, 17 nt, Homo sapiens
acugucacgucccgugc

SEQ ID NO: 1555 - RNA, 17 nt, Homo sapiens
cacgucccgugcgucca

SEQ ID NO: 1556 - RNA, 17 nt, Homo sapiens
ucccgugcguccaaugc

SEQ ID NO: 1557 - RNA, 17 nt, Homo sapiens
caauuacagugacuucc

SEQ ID NO: 1558 - RNA, 17 nt, Homo sapiens
ggacaccagcaaauucc

SEQ ID NO: 1559 - RNA, 17 nt, Homo sapiens
auuccccagcccucugg

SEQ ID NO: 1560 - RNA, 17 nt, Homo sapiens
gcccucugguaguuuau

SEQ ID NO: 1561 - RNA, 17 nt, Homo sapiens
cucugguaguuuaugca

SEQ ID NO: 1562 - RNA, 17 nt, Homo sapiens
gccaaggagccucccca

SEQ ID NO: 1563 - RNA, 17 nt, Homo sapiens
uucucagggccaguguc

SEQ ID NO: 1564 - RNA, 17 nt, Homo sapiens
cagggccagugucacag

SEQ ID NO: 1565 - RNA, 17 nt, Homo sapiens
gugucacagcccugauu

SEQ ID NO: 1566 - RNA, 17 nt, Homo sapiens
uugaaucagugaaugga

SEQ ID NO: 1567 - RNA, 17 nt, Homo sapiens
gaaaaacaguuaccuug

SEQ ID NO: 1568 - RNA, 17 nt, Homo sapiens
auaauggagcaggugcu

SEQ ID NO: 1569 - RNA, 17 nt, Homo sapiens
uggagcaggugcugaug

SEQ ID NO: 1570 - RNA, 17 nt, Homo sapiens
ggaugacggugucuacu

SEQ ID NO: 1571 - RNA, 17 nt, Homo sapiens
uacucaagguauuucac

SEQ ID NO: 1572 - RNA, 17 nt, Homo sapiens
cacgaaugguagauaca

SEQ ID NO: 1573 - RNA, 17 nt, Homo sapiens
uagauacaguguaaaag

SEQ ID NO: 1574 - RNA, 17 nt, Homo sapiens
guguaaaagugcgggcu

SEQ ID NO: 1575 - RNA, 17 nt, Homo sapiens
aagugcgggcucuggga

SEQ ID NO: 1576 - RNA, 17 nt, Homo sapiens
ugggaggaguuaacgca

SEQ ID NO: 1577 - RNA, 17 nt, Homo sapiens
uuaacgcagccagacgg

SEQ ID NO: 1578 - RNA, 17 nt, Homo sapiens
gacggagagugauaccc

SEQ ID NO: 1579 - RNA, 17 nt, Homo sapiens
auaccccagcagagugg

SEQ ID NO: 1580 - RNA, 17 nt, Homo sapiens
ccagcagaguggagcac

SEQ ID NO: 1581 - RNA, 17 nt, Homo sapiens
agaguggagcacuguac

SEQ ID NO: 1582 - RNA, 17 nt, Homo sapiens
cauaccuggcuggauug

SEQ ID NO: 1583 - RNA, 17 nt, Homo sapiens
caacacaagcaagugug

SEQ ID NO: 1584 - RNA, 17 nt, Homo sapiens
acaagcaaguguguuuc

SEQ ID NO: 1585 - RNA, 17 nt, Homo sapiens
guguuucagcagaacau

SEQ ID NO: 1586 - RNA, 17 nt, Homo sapiens
cucgggaggcucauuug

SEQ ID NO: 1587 - RNA, 17 nt, Homo sapiens
cauuuguggcuucugau

SEQ ID NO: 1588 - RNA, 17 nt, Homo sapiens
cccaccuggccaaauca

SEQ ID NO: 1589 - RNA, 17 nt, Homo sapiens
accugaaggcggaaauu

SEQ ID NO: 1590 - RNA, 17 nt, Homo sapiens
ucacgggggcagucuca

SEQ ID NO: 1591 - RNA, 17 nt, Homo sapiens
cgggggcagucucauua

SEQ ID NO: 1592 - RNA, 17 nt, Homo sapiens
cuuggacagcuccuggg

SEQ ID NO: 1593 - RNA, 17 nt, Homo sapiens
auggaacagcucacaag

SEQ ID NO: 1594 - RNA, 17 nt, Homo sapiens
gcucacaaguauaucau

SEQ ID NO: 1595 - RNA, 17 nt, Homo sapiens
ucgaauaaguacaagua

SEQ ID NO: 1596 - RNA, 17 nt, Homo sapiens
aaguacaaguauucuug

SEQ ID NO: 1597 - RNA, 17 nt, Homo sapiens
agagacaaguucaauga

SEQ ID NO: 1598 - RNA, 17 nt, Homo sapiens
cucuucaagugaauacu

SEQ ID NO: 1599 - RNA, 17 nt, Homo sapiens
caaaggaagccaacucu

SEQ ID NO: 1600 - RNA, 17 nt, Homo sapiens
cugaggaagucuuuuug

SEQ ID NO: 1601 - RNA, 17 nt, Homo sapiens
ugaaaauggcacagauc

SEQ ID NO: 1602 - RNA, 17 nt, Homo sapiens
cuauucaggcuguugau

SEQ ID NO: 1603 - RNA, 17 nt, Homo sapiens
uugauaaggucgaucug

SEQ ID NO: 1604 - RNA, 17 nt, Homo sapiens
uugcacgaguaucuuug

SEQ ID NO: 1605 - RNA, 17 nt, Homo sapiens
gacaccuaguccugaug

SEQ ID NO: 1606 - RNA, 17 nt, Homo sapiens
gaugaaacgucugcucc

SEQ ID NO: 1607 - RNA, 17 nt, Homo sapiens
uaucaacagcaccauuc

SEQ ID NO: 1608 - RNA, 17 nt, Homo sapiens
cauuccuggcauucaca

SEQ ID NO: 1609 - RNA, 17 nt, Homo sapiens
auguggaaguggauagg

SEQ ID NO: 1610 - RNA, 17 nt, Homo sapiens
gaacugcagcugucaau

SEQ ID NO: 1611 - RNA, 17 nt, Homo sapiens
ugucaauagccuagggc

SEQ ID NO: 1612 - RNA, 17 nt, Homo sapiens
agccuagggcugaauuu

SEQ ID NO: 1613 - RNA, 17 nt, Homo sapiens
uguagggggcgauauac

SEQ ID NO: 1614 - RNA, 17 nt, Homo sapiens
uguauauaguacauuua

SEQ ID NO: 1615 - RNA, 17 nt, Homo sapiens
uguagggggcgauaaaa

SEQ ID NO: 1616 - RNA, 17 nt, Homo sapiens
ugguacaaauggaugug

SEQ ID NO: 1617 - RNA, 17 nt, Homo sapiens
acaaauggauguggaau

SEQ ID NO: 1618 - RNA, 17 nt, Homo sapiens
gauguggaauauaauug

SEQ ID NO: 1619 - RNA, 17 nt, Homo sapiens
ggaauauaauugaauau

SEQ ID NO: 1620 - RNA, 17 nt, Homo sapiens
auaauugaauauuuucu

SEQ ID NO: 1621 - RNA, 17 nt, Homo sapiens
gaaggcagauggaaaua

SEQ ID NO: 1622 - RNA, 17 nt, Homo sapiens
agauggaaauauuuaca

SEQ ID NO: 1623 - RNA, 17 nt, Homo sapiens
aguacgcaauuugagac

SEQ ID NO: 1624 - RNA, 17 nt, Homo sapiens
aauuugagacuaagaua

SEQ ID NO: 1625 - RNA, 17 nt, Homo sapiens
agacuaagauauuguua

SEQ ID NO: 1626 - RNA, 17 nt, Homo sapiens
uauugaagacaagagca

SEQ ID NO: 1627 - RNA, 17 nt, Homo sapiens
caagagcaauaguaaaa

SEQ ID NO: 1628 - RNA, 17 nt, Homo sapiens
auaguaaaacacaucag

SEQ ID NO: 1629 - RNA, 17 nt, Homo sapiens
gguuaaagaccugugau

SEQ ID NO: 1630 - RNA, 17 nt, Homo sapiens
gaccugugauaaaccac

SEQ ID NO: 1631 - RNA, 17 nt, Homo sapiens
ugugauaaaccacuucc

SEQ ID NO: 1632 - RNA, 17 nt, Homo sapiens
cacuuccgauaaguugg

SEQ ID NO: 1633 - RNA, 17 nt, Homo sapiens
aguuggaaacguguguc

SEQ ID NO: 1634 - RNA, 17 nt, Homo sapiens
uauauauaaugguaaag

SEQ ID NO: 1635 - RNA, 17 nt, Homo sapiens
aaagaaagacaccuucg

SEQ ID NO: 1636 - RNA, 17 nt, Homo sapiens
ccuucguaacccgcauu

SEQ ID NO: 1637 - RNA, 17 nt, Homo sapiens
agagaggaaucacaggg

SEQ ID NO: 1638 - RNA, 17 nt, Homo sapiens
acagggagauguacagc

SEQ ID NO: 1639 - RNA, 17 nt, Homo sapiens
guacagcaauggggcca

SEQ ID NO: 1640 - RNA, 17 nt, Homo sapiens
ucaucuugauucuucac

SEQ ID NO: 1641 - RNA, 17 nt, Homo sapiens
ccugaguaauucacuca

SEQ ID NO: 1642 - RNA, 17 nt, Homo sapiens
ucagcugaacaacaaug

SEQ ID NO: 1643 - RNA, 17 nt, Homo sapiens
gcugaacaacaauggcu

SEQ ID NO: 1644 - RNA, 17 nt, Homo sapiens
gaacaacaauggcuaug

SEQ ID NO: 1645 - RNA, 17 nt, Homo sapiens
ucguugcaaucgacccc

SEQ ID NO: 1646 - RNA, 17 nt, Homo sapiens
ugcaaucgaccccaaug

SEQ ID NO: 1647 - RNA, 17 nt, Homo sapiens
cgaccccaaugugccag

SEQ ID NO: 1648 - RNA, 17 nt, Homo sapiens
gccagaagaugaaacac

SEQ ID NO: 1649 - RNA, 17 nt, Homo sapiens
aagaugaaacacucauu

SEQ ID NO: 1650 - RNA, 17 nt, Homo sapiens
cucauucaacaaauaaa

SEQ ID NO: 1651 - RNA, 17 nt, Homo sapiens
uucaacaaauaaaggac

SEQ ID NO: 1652 - RNA, 17 nt, Homo sapiens
aauaaaggacaugguga

SEQ ID NO: 1653 - RNA, 17 nt, Homo sapiens
acauggugacccaggca

SEQ ID NO: 1654 - RNA, 17 nt, Homo sapiens
ggaaagcgauuuuauuu

SEQ ID NO: 1655 - RNA, 17 nt, Homo sapiens
uuucaaaaauguugcca

SEQ ID NO: 1656 - RNA, 17 nt, Homo sapiens
ccauuuugauuccugaa

SEQ ID NO: 1657 - RNA, 17 nt, Homo sapiens
uuccugaaacauggaag

SEQ ID NO: 1658 - RNA, 17 nt, Homo sapiens
cauggaagacaaaggcu

SEQ ID NO: 1659 - RNA, 17 nt, Homo sapiens
aaaggcugacuauguga

SEQ ID NO: 1660 - RNA, 17 nt, Homo sapiens
uaugugagaccaaaacu

SEQ ID NO: 1661 - RNA, 17 nt, Homo sapiens
agaccaaaacuugagac

SEQ ID NO: 1662 - RNA, 17 nt, Homo sapiens
aacuugagaccuacaaa

SEQ ID NO: 1663 - RNA, 17 nt, Homo sapiens
cuacaaaaaugcugaug

SEQ ID NO: 1664 - RNA, 17 nt, Homo sapiens
aaaugcugauguucugg

SEQ ID NO: 1665 - RNA, 17 nt, Homo sapiens
uccagguaaugaugaac

SEQ ID NO: 1666 - RNA, 17 nt, Homo sapiens
agguaaugaugaacccu

SEQ ID NO: 1667 - RNA, 17 nt, Homo sapiens
aaugaugaacccuacac

SEQ ID NO: 1668 - RNA, 17 nt, Homo sapiens
cugagcagaugggcaac

SEQ ID NO: 1669 - RNA, 17 nt, Homo sapiens
gaugggcaacuguggag

SEQ ID NO: 1670 - RNA, 17 nt, Homo sapiens
gugaaaggauccaccuc

SEQ ID NO: 1671 - RNA, 17 nt, Homo sapiens
cacuccugauuucauug

SEQ ID NO: 1672 - RNA, 17 nt, Homo sapiens
uuagcugaauauggacc

SEQ ID NO: 1673 - RNA, 17 nt, Homo sapiens
gaauauggaccacaagg

SEQ ID NO: 1674 - RNA, 17 nt, Homo sapiens
caucuacgauggggagu

SEQ ID NO: 1675 - RNA, 17 nt, Homo sapiens
aguauuugacgaguaca

SEQ ID NO: 1676 - RNA, 17 nt, Homo sapiens
cgaguacaauaaugaug

SEQ ID NO: 1677 - RNA, 17 nt, Homo sapiens
guacaauaaugaugaga

SEQ ID NO: 1678 - RNA, 17 nt, Homo sapiens
caauaaugaugagaaau

SEQ ID NO: 1679 - RNA, 17 nt, Homo sapiens
gaugagaaauucuacuu

SEQ ID NO: 1680 - RNA, 17 nt, Homo sapiens
cuuauccaauggaagaa

SEQ ID NO: 1681 - RNA, 17 nt, Homo sapiens
auggaagaauacaagca

SEQ ID NO: 1682 - RNA, 17 nt, Homo sapiens
gcaguaagauguucagc

SEQ ID NO: 1683 - RNA, 17 nt, Homo sapiens
ugguacaaauguaguaa

SEQ ID NO: 1684 - RNA, 17 nt, Homo sapiens
accaaaagaugcacauu

SEQ ID NO: 1685 - RNA, 17 nt, Homo sapiens
cacauucaauaaaguua

SEQ ID NO: 1686 - RNA, 17 nt, Homo sapiens
guuacaggacucuauga

SEQ ID NO: 1687 - RNA, 17 nt, Homo sapiens
gaaaaaggaugugaguu

SEQ ID NO: 1688 - RNA, 17 nt, Homo sapiens
guucuccaaucccgcca

SEQ ID NO: 1689 - RNA, 17 nt, Homo sapiens
cccgccagacggagaag

SEQ ID NO: 1690 - RNA, 17 nt, Homo sapiens
cuucuauaauguuugca

SEQ ID NO: 1691 - RNA, 17 nt, Homo sapiens
uuugcacaacauguuga

SEQ ID NO: 1692 - RNA, 17 nt, Homo sapiens
acauguugauucuauag

SEQ ID NO: 1693 - RNA, 17 nt, Homo sapiens
auaguugaauucuguac

SEQ ID NO: 1694 - RNA, 17 nt, Homo sapiens
uguacagaacaaaacca

SEQ ID NO: 1695 - RNA, 17 nt, Homo sapiens
agaacaaaaccacaaca

SEQ ID NO: 1696 - RNA, 17 nt, Homo sapiens
aaaccacaacaaagaag

SEQ ID NO: 1697 - RNA, 17 nt, Homo sapiens
agcuccaaacaagcaaa

SEQ ID NO: 1698 - RNA, 17 nt, Homo sapiens
caagcaaaaucaaaaau

SEQ ID NO: 1699 - RNA, 17 nt, Homo sapiens
aaucaaaaaugcaaucu

SEQ ID NO: 1700 - RNA, 17 nt, Homo sapiens
aaaaugcaaucuccgaa

SEQ ID NO: 1701 - RNA, 17 nt, Homo sapiens
gggaagugauccgugau

SEQ ID NO: 1702 - RNA, 17 nt, Homo sapiens
gauccgugauucugagg

SEQ ID NO: 1703 - RNA, 17 nt, Homo sapiens
uucugaggacuuuaaga

SEQ ID NO: 1704 - RNA, 17 nt, Homo sapiens
uuaagaaaaccacuccu

SEQ ID NO: 1705 - RNA, 17 nt, Homo sapiens
cuccuaugacaacacag

SEQ ID NO: 1706 - RNA, 17 nt, Homo sapiens
cuaugacaacacagcca

SEQ ID NO: 1707 - RNA, 17 nt, Homo sapiens
gccaccaaaucccaccu

SEQ ID NO: 1708 - RNA, 17 nt, Homo sapiens
ugcugcagauuggacaa

SEQ ID NO: 1709 - RNA, 17 nt, Homo sapiens
cagauuggacaaagaau

SEQ ID NO: 1710 - RNA, 17 nt, Homo sapiens
gacaaagaauugugugu

SEQ ID NO: 1711 - RNA, 17 nt, Homo sapiens
aguccuugacaaaucug

SEQ ID NO: 1712 - RNA, 17 nt, Homo sapiens
cuugacaaaucuggaag

SEQ ID NO: 1713 - RNA, 17 nt, Homo sapiens
gcauggcgacugguaac

SEQ ID NO: 1714 - RNA, 17 nt, Homo sapiens
gacugguaaccgccuca

SEQ ID NO: 1715 - RNA, 17 nt, Homo sapiens
ccgccucaaucgacuga

SEQ ID NO: 1716 - RNA, 17 nt, Homo sapiens
cucaaucgacugaauca

SEQ ID NO: 1717 - RNA, 17 nt, Homo sapiens
ucgacugaaucaagcag

SEQ ID NO: 1718 - RNA, 17 nt, Homo sapiens
ugcugcagacaguugag

SEQ ID NO: 1719 - RNA, 17 nt, Homo sapiens
ggguugggauggugaca

SEQ ID NO: 1720 - RNA, 17 nt, Homo sapiens
ggauggugacauuugac

SEQ ID NO: 1721 - RNA, 17 nt, Homo sapiens
gacauuugacagugcug

SEQ ID NO: 1722 - RNA, 17 nt, Homo sapiens
caaagugaacucauaca

SEQ ID NO: 1723 - RNA, 17 nt, Homo sapiens
ucauacagauaaacagu

SEQ ID NO: 1724 - RNA, 17 nt, Homo sapiens
acagauaaacaguggca

SEQ ID NO: 1725 - RNA, 17 nt, Homo sapiens
uggcagugacagggaca

SEQ ID NO: 1726 - RNA, 17 nt, Homo sapiens
ugacagggacacacucg

SEQ ID NO: 1727 - RNA, 17 nt, Homo sapiens
gccaaaagauuaccugc

SEQ ID NO: 1728 - RNA, 17 nt, Homo sapiens
caggagggacguccauc

SEQ ID NO: 1729 - RNA, 17 nt, Homo sapiens
gggcuucgaucggcauu

SEQ ID NO: 1730 - RNA, 17 nt, Homo sapiens
uuacugugauuaggaag

SEQ ID NO: 1731 - RNA, 17 nt, Homo sapiens
aggaagaaauauccaac

SEQ ID NO: 1732 - RNA, 17 nt, Homo sapiens
aauauccaacugaugga

SEQ ID NO: 1733 - RNA, 17 nt, Homo sapiens
uccaacugauggaucug

SEQ ID NO: 1734 - RNA, 17 nt, Homo sapiens
acugauggaucugaaau

SEQ ID NO: 1735 - RNA, 17 nt, Homo sapiens
gaucugaaauugugcug

SEQ ID NO: 1736 - RNA, 17 nt, Homo sapiens
ugcugcugacggauggg

SEQ ID NO: 1737 - RNA, 17 nt, Homo sapiens
gcugacggauggggaag

SEQ ID NO: 1738 - RNA, 17 nt, Homo sapiens
uggggaagacaacacua

SEQ ID NO: 1739 - RNA, 17 nt, Homo sapiens
ggaagacaacacuauaa

SEQ ID NO: 1740 - RNA, 17 nt, Homo sapiens
gugcuuuaacgagguca

SEQ ID NO: 1741 - RNA, 17 nt, Homo sapiens
gaggucaaacaaagugg

SEQ ID NO: 1742 - RNA, 17 nt, Homo sapiens
gcucaagaacuagagga

SEQ ID NO: 1743 - RNA, 17 nt, Homo sapiens
uguccaaaaugacagga

SEQ ID NO: 1744 - RNA, 17 nt, Homo sapiens
ccaaaaugacaggaggu

SEQ ID NO: 1745 - RNA, 17 nt, Homo sapiens
guuuacagacauaugcu

SEQ ID NO: 1746 - RNA, 17 nt, Homo sapiens
ugcuucagaucaaguuc

SEQ ID NO: 1747 - RNA, 17 nt, Homo sapiens
aguucagaacaauggcc

SEQ ID NO: 1748 - RNA, 17 nt, Homo sapiens
ucagaacaauggccuca

SEQ ID NO: 1749 - RNA, 17 nt, Homo sapiens
ccucauugaugcuuuug

SEQ ID NO: 1750 - RNA, 17 nt, Homo sapiens
aucaggaaauggagcug

SEQ ID NO: 1751 - RNA, 17 nt, Homo sapiens
aguaagggauuaacccu

SEQ ID NO: 1752 - RNA, 17 nt, Homo sapiens
agggauuaacccuccag

SEQ ID NO: 1753 - RNA, 17 nt, Homo sapiens
ccuccagaacagccagu

SEQ ID NO: 1754 - RNA, 17 nt, Homo sapiens
gccaguggaugaauggc

SEQ ID NO: 1755 - RNA, 17 nt, Homo sapiens
guggaugaauggcacag

SEQ ID NO: 1756 - RNA, 17 nt, Homo sapiens
gcacagugaucguggac

SEQ ID NO: 1757 - RNA, 17 nt, Homo sapiens
gaucguggacagcaccg

SEQ ID NO: 1758 - RNA, 17 nt, Homo sapiens
gggaaaggacacuuugu

SEQ ID NO: 1759 - RNA, 17 nt, Homo sapiens
ucaccuggacaacgcag

SEQ ID NO: 1760 - RNA, 17 nt, Homo sapiens
ccuggacaacgcagccu

SEQ ID NO: 1761 - RNA, 17 nt, Homo sapiens
cuccccaaauccuucuc

SEQ ID NO: 1762 - RNA, 17 nt, Homo sapiens
ucucugggaucccagug

SEQ ID NO: 1763 - RNA, 17 nt, Homo sapiens
cccaguggacagaagca

SEQ ID NO: 1764 - RNA, 17 nt, Homo sapiens
uguaguggacaaaaaca

SEQ ID NO: 1765 - RNA, 17 nt, Homo sapiens
ggacaaaaacaccaaaa

SEQ ID NO: 1766 - RNA, 17 nt, Homo sapiens
acaccaaaauggccuac

SEQ ID NO: 1767 - RNA, 17 nt, Homo sapiens
accuccaaaucccaggc

SEQ ID NO: 1768 - RNA, 17 nt, Homo sapiens
acuuggaaauacagucu

SEQ ID NO: 1769 - RNA, 17 nt, Homo sapiens
gcucacaaaccuugacc

SEQ ID NO: 1770 - RNA, 17 nt, Homo sapiens
aaaccuugacccugacu

SEQ ID NO: 1771 - RNA, 17 nt, Homo sapiens
ugacccugacugucacg

SEQ ID NO: 1772 - RNA, 17 nt, Homo sapiens
ugcguccaaugcuaccc

SEQ ID NO: 1773 - RNA, 17 nt, Homo sapiens
ugccuccaauuacagug

SEQ ID NO: 1774 - RNA, 17 nt, Homo sapiens
uuacagugacuuccaaa

SEQ ID NO: 1775 - RNA, 17 nt, Homo sapiens
cuuccaaaacgaacaag

SEQ ID NO: 1776 - RNA, 17 nt, Homo sapiens
caaaacgaacaaggaca

SEQ ID NO: 1777 - RNA, 17 nt, Homo sapiens
gaacaaggacaccagca

SEQ ID NO: 1778 - RNA, 17 nt, Homo sapiens
accagcaaauuccccag

SEQ ID NO: 1779 - RNA, 17 nt, Homo sapiens
uuaugcaaauauucgcc

SEQ ID NO: 1780 - RNA, 17 nt, Homo sapiens
ccuccccaauucucagg

SEQ ID NO: 1781 - RNA, 17 nt, Homo sapiens
cagcccugauugaauca

SEQ ID NO: 1782 - RNA, 17 nt, Homo sapiens
cugauugaaucagugaa

SEQ ID NO: 1783 - RNA, 17 nt, Homo sapiens
aucagugaauggaaaaa

SEQ ID NO: 1784 - RNA, 17 nt, Homo sapiens
auggaaaaacaguuacc

SEQ ID NO: 1785 - RNA, 17 nt, Homo sapiens
accuuggaacuacugga

SEQ ID NO: 1786 - RNA, 17 nt, Homo sapiens
acuacuggauaauggag

SEQ ID NO: 1787 - RNA, 17 nt, Homo sapiens
acuggauaauggagcag

SEQ ID NO: 1788 - RNA, 17 nt, Homo sapiens
aggugcugaugcuacua

SEQ ID NO: 1789 - RNA, 17 nt, Homo sapiens
uacuaaggaugacggug

SEQ ID NO: 1790 - RNA, 17 nt, Homo sapiens
uaaggaugacggugucu

SEQ ID NO: 1791 - RNA, 17 nt, Homo sapiens
auuucacaacuuaugac

SEQ ID NO: 1792 - RNA, 17 nt, Homo sapiens
aacuuaugacacgaaug

SEQ ID NO: 1793 - RNA, 17 nt, Homo sapiens
ugacacgaaugguagau

SEQ ID NO: 1794 - RNA, 17 nt, Homo sapiens
aaugguagauacagugu

SEQ ID NO: 1795 - RNA, 17 nt, Homo sapiens
aggaguuaacgcagcca

SEQ ID NO: 1796 - RNA, 17 nt, Homo sapiens
gcagccagacggagagu

SEQ ID NO: 1797 - RNA, 17 nt, Homo sapiens
ggagagugauaccccag

SEQ ID NO: 1798 - RNA, 17 nt, Homo sapiens
cuggcuggauugagaau

SEQ ID NO: 1799 - RNA, 17 nt, Homo sapiens
gauugagaaugaugaaa

SEQ ID NO: 1800 - RNA, 17 nt, Homo sapiens
ugagaaugaugaaauac

SEQ ID NO: 1801 - RNA, 17 nt, Homo sapiens
augaugaaauacaaugg

SEQ ID NO: 1802 - RNA, 17 nt, Homo sapiens
gaaauacaauggaaucc

SEQ ID NO: 1803 - RNA, 17 nt, Homo sapiens
acaauggaauccaccaa

SEQ ID NO: 1804 - RNA, 17 nt, Homo sapiens
ccaccaagaccugaaau

SEQ ID NO: 1805 - RNA, 17 nt, Homo sapiens
gaccugaaauuaauaag

SEQ ID NO: 1806 - RNA, 17 nt, Homo sapiens
ugaaauuaauaaggaug

SEQ ID NO: 1807 - RNA, 17 nt, Homo sapiens
uaauaaggaugauguuc

SEQ ID NO: 1808 - RNA, 17 nt, Homo sapiens
uaaggaugauguucaac

SEQ ID NO: 1809 - RNA, 17 nt, Homo sapiens
gauguucaacacaagca

SEQ ID NO: 1810 - RNA, 17 nt, Homo sapiens
ucagcagaacauccucg

SEQ ID NO: 1811 - RNA, 17 nt, Homo sapiens
ggcuucugaugucccaa

SEQ ID NO: 1812 - RNA, 17 nt, Homo sapiens
ugucccaaaugcuccca

SEQ ID NO: 1813 - RNA, 17 nt, Homo sapiens
cauaccugaucucuucc

SEQ ID NO: 1814 - RNA, 17 nt, Homo sapiens
cuggccaaaucaccgac

SEQ ID NO: 1815 - RNA, 17 nt, Homo sapiens
aaucaccgaccugaagg

SEQ ID NO: 1816 - RNA, 17 nt, Homo sapiens
aggcggaaauucacggg

SEQ ID NO: 1817 - RNA, 17 nt, Homo sapiens
ucucauuaaucugacuu

SEQ ID NO: 1818 - RNA, 17 nt, Homo sapiens
uuaaucugacuuggaca

SEQ ID NO: 1819 - RNA, 17 nt, Homo sapiens
ugacuuggacagcuccu

SEQ ID NO: 1820 - RNA, 17 nt, Homo sapiens
uccuggggaugauuaug

SEQ ID NO: 1821 - RNA, 17 nt, Homo sapiens
uggggaugauuaugacc

SEQ ID NO: 1822 - RNA, 17 nt, Homo sapiens
ugauuaugaccauggaa

SEQ ID NO: 1823 - RNA, 17 nt, Homo sapiens
accauggaacagcucac

SEQ ID NO: 1824 - RNA, 17 nt, Homo sapiens
ucauucgaauaaguaca

SEQ ID NO: 1825 - RNA, 17 nt, Homo sapiens
uauucuugaucucagag

SEQ ID NO: 1826 - RNA, 17 nt, Homo sapiens
ucucagagacaaguuca

SEQ ID NO: 1827 - RNA, 17 nt, Homo sapiens
caaguucaaugaaucuc

SEQ ID NO: 1828 - RNA, 17 nt, Homo sapiens
uucaaugaaucucuuca

SEQ ID NO: 1829 - RNA, 17 nt, Homo sapiens
ucaagugaauacuacug

SEQ ID NO: 1830 - RNA, 17 nt, Homo sapiens
ggaagccaacucugagg

SEQ ID NO: 1831 - RNA, 17 nt, Homo sapiens
uuguuuaaaccagaaaa

SEQ ID NO: 1832 - RNA, 17 nt, Homo sapiens
accagaaaacauuacuu

SEQ ID NO: 1833 - RNA, 17 nt, Homo sapiens
uuuugaaaauggcacag

SEQ ID NO: 1834 - RNA, 17 nt, Homo sapiens
uggcacagaucuuuuca

SEQ ID NO: 1835 - RNA, 17 nt, Homo sapiens
ggcuguugauaaggucg

SEQ ID NO: 1836 - RNA, 17 nt, Homo sapiens
uaaggucgaucugaaau

SEQ ID NO: 1837 - RNA, 17 nt, Homo sapiens
gaucugaaaucagaaau

SEQ ID NO: 1838 - RNA, 17 nt, Homo sapiens
aaucagaaauauccaac

SEQ ID NO: 1839 - RNA, 17 nt, Homo sapiens
aauauccaacauugcac

SEQ ID NO: 1840 - RNA, 17 nt, Homo sapiens
cuccacagacuccgcca

SEQ ID NO: 1841 - RNA, 17 nt, Homo sapiens
cgccagagacaccuagu

SEQ ID NO: 1842 - RNA, 17 nt, Homo sapiens
uaguccugaugaaacgu

SEQ ID NO: 1843 - RNA, 17 nt, Homo sapiens
cugaugaaacgucugcu

SEQ ID NO: 1844 - RNA, 17 nt, Homo sapiens
uuguccuaauauucaua

SEQ ID NO: 1845 - RNA, 17 nt, Homo sapiens
ucauaucaacagcacca

SEQ ID NO: 1846 - RNA, 17 nt, Homo sapiens
uuuuaaaaauuaugugg

SEQ ID NO: 1847 - RNA, 17 nt, Homo sapiens
ggaaguggauaggagaa

SEQ ID NO: 1848 - RNA, 17 nt, Homo sapiens
auaggagaacugcagcu

SEQ ID NO: 1849 - RNA, 17 nt, Homo sapiens
agcugucaauagccuag

SEQ ID NO: 1850 - RNA, 17 nt, Homo sapiens
agggcugaauuuuuguc

SEQ ID NO: 1851 - RNA, 17 nt, Homo sapiens
uuugucagauaaauaaa

SEQ ID NO: 1852 - RNA, 17 nt, Homo sapiens
ucagauaaauaaaauaa

SEQ ID NO: 1853 - RNA, 17 nt, Homo sapiens
uaaauaaaauaaaucau

SEQ ID NO: 1854 - RNA, 17 nt, Homo sapiens
uaaaauaaaucauucau

SEQ ID NO: 1855 - RNA, 17 nt, Homo sapiens
uuuuuuugauuauaaaa

SEQ ID NO: 1856 - RNA, 17 nt, Homo sapiens
auuauaaaauuuucuaa

SEQ ID NO: 1857 - RNA, 17 nt, Homo sapiens
uuucuaaaauguauuuu

SEQ ID NO: 1858 - RNA, 17 nt, Homo sapiens
uauuuuagacuuccugu

SEQ ID NO: 1859 - RNA, 17 nt, Homo sapiens
agggggcgauauacuaa

SEQ ID NO: 1860 - RNA, 17 nt, Homo sapiens
uauacuaaauguauaua

SEQ ID NO: 1861 - RNA, 17 nt, Homo sapiens
uauacuaaauguauucc

SEQ ID NO: 1862 - RNA, 17 nt, Homo sapiens
uauacuaaauguauuuu

SEQ ID NO: 1863 - RNA, 17 nt, Homo sapiens
agggggcgauaaaauaa

SEQ ID NO: 1864 - RNA, 17 nt, Homo sapiens
gcgauaaaauaaaaugc

SEQ ID NO: 1865 - RNA, 17 nt, Homo sapiens
aaaauaaaaugcuaaac

SEQ ID NO: 1866 - RNA, 17 nt, Homo sapiens
aaugcuaaacaacuggg

SEQ ID NO: 1867 - RNA, 17 nt, Homo sapiens
gcuaaacaacuggguaa

SEQ ID NO: 1868 - RNA, 17 nt, Homo sapiens
augcuuuugguacaaau

SEQ ID NO: 1869 - RNA, 17 nt, Homo sapiens
guacaaauggaugugga

SEQ ID NO: 1870 - RNA, 17 nt, Homo sapiens
uacaaauggauguggaa

SEQ ID NO: 1871 - RNA, 17 nt, Homo sapiens
auggauguggaauauaa

SEQ ID NO: 1872 - RNA, 17 nt, Homo sapiens
uggauguggaauauaau

SEQ ID NO: 1873 - RNA, 17 nt, Homo sapiens
uuguuuaaggggagcau

SEQ ID NO: 1874 - RNA, 17 nt, Homo sapiens
uguuuaaggggagcaug

SEQ ID NO: 1875 - RNA, 17 nt, Homo sapiens
guuuaaggggagcauga

SEQ ID NO: 1876 - RNA, 17 nt, Homo sapiens
uuuaaggggagcaugaa

SEQ ID NO: 1877 - RNA, 17 nt, Homo sapiens
agcaugaagagguguug

SEQ ID NO: 1878 - RNA, 17 nt, Homo sapiens
caugaagagguguugag

SEQ ID NO: 1879 - RNA, 17 nt, Homo sapiens
gguguugagguuauguc

SEQ ID NO: 1880 - RNA, 17 nt, Homo sapiens
aagcaucuggcacagcu

SEQ ID NO: 1881 - RNA, 17 nt, Homo sapiens
cagcugaaggcagaugg

SEQ ID NO: 1882 - RNA, 17 nt, Homo sapiens
ugaaggcagauggaaau

SEQ ID NO: 1883 - RNA, 17 nt, Homo sapiens
aggcagauggaaauauu

SEQ ID NO: 1884 - RNA, 17 nt, Homo sapiens
ggcagauggaaauauuu

SEQ ID NO: 1885 - RNA, 17 nt, Homo sapiens
caauuugagacuaagau

SEQ ID NO: 1886 - RNA, 17 nt, Homo sapiens
gagacuaagauauuguu

SEQ ID NO: 1887 - RNA, 17 nt, Homo sapiens
cuauugaagacaagagc

SEQ ID NO: 1888 - RNA, 17 nt, Homo sapiens
gaagacaagagcaauag

SEQ ID NO: 1889 - RNA, 17 nt, Homo sapiens
acacaucaggucagggg

SEQ ID NO: 1890 - RNA, 17 nt, Homo sapiens
ucaggucaggggguuaa

SEQ ID NO: 1891 - RNA, 17 nt, Homo sapiens
caggucaggggguuaaa

SEQ ID NO: 1892 - RNA, 17 nt, Homo sapiens
aggucaggggguuaaag

SEQ ID NO: 1893 - RNA, 17 nt, Homo sapiens
ggucaggggguuaaaga

SEQ ID NO: 1894 - RNA, 17 nt, Homo sapiens
ggguuaaagaccuguga

SEQ ID NO: 1895 - RNA, 17 nt, Homo sapiens
gauaaguuggaaacgug

SEQ ID NO: 1896 - RNA, 17 nt, Homo sapiens
auaaguuggaaacgugu

SEQ ID NO: 1897 - RNA, 17 nt, Homo sapiens
uauauaaugguaaagaa

SEQ ID NO: 1898 - RNA, 17 nt, Homo sapiens
augguaaagaaagacac

SEQ ID NO: 1899 - RNA, 17 nt, Homo sapiens
uaaagaaagacaccuuc

SEQ ID NO: 1900 - RNA, 17 nt, Homo sapiens
uuuccaaagagaggaau

SEQ ID NO: 1901 - RNA, 17 nt, Homo sapiens
uccaaagagaggaauca

SEQ ID NO: 1902 - RNA, 17 nt, Homo sapiens
caaagagaggaaucaca

SEQ ID NO: 1903 - RNA, 17 nt, Homo sapiens
aaagagaggaaucacag

SEQ ID NO: 1904 - RNA, 17 nt, Homo sapiens
gaaucacagggagaugu

SEQ ID NO: 1905 - RNA, 17 nt, Homo sapiens
aaucacagggagaugua

SEQ ID NO: 1906 - RNA, 17 nt, Homo sapiens
aucacagggagauguac

SEQ ID NO: 1907 - RNA, 17 nt, Homo sapiens
cacagggagauguacag

SEQ ID NO: 1908 - RNA, 17 nt, Homo sapiens
acagcaauggggccauu

SEQ ID NO: 1909 - RNA, 17 nt, Homo sapiens
cagcaauggggccauuu

SEQ ID NO: 1910 - RNA, 17 nt, Homo sapiens
agcaauggggccauuua

SEQ ID NO: 1911 - RNA, 17 nt, Homo sapiens
ccauuuaagaguucugu

SEQ ID NO: 1912 - RNA, 17 nt, Homo sapiens
accuucuagaaggggcc

SEQ ID NO: 1913 - RNA, 17 nt, Homo sapiens
uucuagaaggggcccug

SEQ ID NO: 1914 - RNA, 17 nt, Homo sapiens
ucuagaaggggcccuga

SEQ ID NO: 1915 - RNA, 17 nt, Homo sapiens
cuagaaggggcccugag

SEQ ID NO: 1916 - RNA, 17 nt, Homo sapiens
acaacaauggcuaugaa

SEQ ID NO: 1917 - RNA, 17 nt, Homo sapiens
gcuaugaaggcauuguc

SEQ ID NO: 1918 - RNA, 17 nt, Homo sapiens
augugccagaagaugaa

SEQ ID NO: 1919 - RNA, 17 nt, Homo sapiens
ugccagaagaugaaaca

SEQ ID NO: 1920 - RNA, 17 nt, Homo sapiens
caaauaaaggacauggu

SEQ ID NO: 1921 - RNA, 17 nt, Homo sapiens
aaauaaaggacauggug

SEQ ID NO: 1922 - RNA, 17 nt, Homo sapiens
aaggacauggugaccca

SEQ ID NO: 1923 - RNA, 17 nt, Homo sapiens
gugacccaggcaucucu

SEQ ID NO: 1924 - RNA, 17 nt, Homo sapiens
aagcuacaggaaagcga

SEQ ID NO: 1925 - RNA, 17 nt, Homo sapiens
agcuacaggaaagcgau

SEQ ID NO: 1926 - RNA, 17 nt, Homo sapiens
ugaaacauggaagacaa

SEQ ID NO: 1927 - RNA, 17 nt, Homo sapiens
gaaacauggaagacaaa

SEQ ID NO: 1928 - RNA, 17 nt, Homo sapiens
acauggaagacaaaggc

SEQ ID NO: 1929 - RNA, 17 nt, Homo sapiens
aagacaaaggcugacua

SEQ ID NO: 1930 - RNA, 17 nt, Homo sapiens
cuaugugagaccaaaac

SEQ ID NO: 1931 - RNA, 17 nt, Homo sapiens
aaacuugagaccuacaa

SEQ ID NO: 1932 - RNA, 17 nt, Homo sapiens
gauguucugguugcuga

SEQ ID NO: 1933 - RNA, 17 nt, Homo sapiens
cuccuccagguaaugau

SEQ ID NO: 1934 - RNA, 17 nt, Homo sapiens
acugagcagaugggcaa

SEQ ID NO: 1935 - RNA, 17 nt, Homo sapiens
gagcagaugggcaacug

SEQ ID NO: 1936 - RNA, 17 nt, Homo sapiens
agcagaugggcaacugu

SEQ ID NO: 1937 - RNA, 17 nt, Homo sapiens
gcaacuguggagagaag

SEQ ID NO: 1938 - RNA, 17 nt, Homo sapiens
caacuguggagagaagg

SEQ ID NO: 1939 - RNA, 17 nt, Homo sapiens
acuguggagagaagggu

SEQ ID NO: 1940 - RNA, 17 nt, Homo sapiens
uguggagagaaggguga

SEQ ID NO: 1941 - RNA, 17 nt, Homo sapiens
ggagagaagggugaaag

SEQ ID NO: 1942 - RNA, 17 nt, Homo sapiens
gagagaagggugaaagg

SEQ ID NO: 1943 - RNA, 17 nt, Homo sapiens
gggugaaaggauccacc

SEQ ID NO: 1944 - RNA, 17 nt, Homo sapiens
ggugaaaggauccaccu

SEQ ID NO: 1945 - RNA, 17 nt, Homo sapiens
ucauugcaggaaaaaag

SEQ ID NO: 1946 - RNA, 17 nt, Homo sapiens
cauugcaggaaaaaagu

SEQ ID NO: 1947 - RNA, 17 nt, Homo sapiens
cugaauauggaccacaa

SEQ ID NO: 1948 - RNA, 17 nt, Homo sapiens
ugaauauggaccacaag

SEQ ID NO: 1949 - RNA, 17 nt, Homo sapiens
gaccacaagguaaggca

SEQ ID NO: 1950 - RNA, 17 nt, Homo sapiens
caagguaaggcauuugu

SEQ ID NO: 1951 - RNA, 17 nt, Homo sapiens
ccaugagugggcucauc

SEQ ID NO: 1952 - RNA, 17 nt, Homo sapiens
caugagugggcucaucu

SEQ ID NO: 1953 - RNA, 17 nt, Homo sapiens
ucuacgauggggaguau

SEQ ID NO: 1954 - RNA, 17 nt, Homo sapiens
cuacgauggggaguauu

SEQ ID NO: 1955 - RNA, 17 nt, Homo sapiens
uacgauggggaguauuu

SEQ ID NO: 1956 - RNA, 17 nt, Homo sapiens
acgauggggaguauuug

SEQ ID NO: 1957 - RNA, 17 nt, Homo sapiens
aaugaugagaaauucua

SEQ ID NO: 1958 - RNA, 17 nt, Homo sapiens
uauccaauggaagaaua

SEQ ID NO: 1959 - RNA, 17 nt, Homo sapiens
auccaauggaagaauac

SEQ ID NO: 1960 - RNA, 17 nt, Homo sapiens
caauggaagaauacaag

SEQ ID NO: 1961 - RNA, 17 nt, Homo sapiens
agcaguaagauguucag

SEQ ID NO: 1962 - RNA, 17 nt, Homo sapiens
guucagcagguauuacu

SEQ ID NO: 1963 - RNA, 17 nt, Homo sapiens
guauuacugguacaaau

SEQ ID NO: 1964 - RNA, 17 nt, Homo sapiens
guaguaaagaaguguca

SEQ ID NO: 1965 - RNA, 17 nt, Homo sapiens
aagugucagggaggcag

SEQ ID NO: 1966 - RNA, 17 nt, Homo sapiens
agugucagggaggcagc

SEQ ID NO: 1967 - RNA, 17 nt, Homo sapiens
gugucagggaggcagcu

SEQ ID NO: 1968 - RNA, 17 nt, Homo sapiens
gucagggaggcagcugu

SEQ ID NO: 1969 - RNA, 17 nt, Homo sapiens
caccaaaagaugcacau

SEQ ID NO: 1970 - RNA, 17 nt, Homo sapiens
aaguuacaggacucuau

SEQ ID NO: 1971 - RNA, 17 nt, Homo sapiens
aguuacaggacucuaug

SEQ ID NO: 1972 - RNA, 17 nt, Homo sapiens
augaaaaaggaugugag

SEQ ID NO: 1973 - RNA, 17 nt, Homo sapiens
ugaaaaaggaugugagu

SEQ ID NO: 1974 - RNA, 17 nt, Homo sapiens
ucccgccagacggagaa

SEQ ID NO: 1975 - RNA, 17 nt, Homo sapiens
cgccagacggagaaggc

SEQ ID NO: 1976 - RNA, 17 nt, Homo sapiens
gccagacggagaaggcu

SEQ ID NO: 1977 - RNA, 17 nt, Homo sapiens
cagacggagaaggcuuc

SEQ ID NO: 1978 - RNA, 17 nt, Homo sapiens
acggagaaggcuucuau

SEQ ID NO: 1979 - RNA, 17 nt, Homo sapiens
ucuguacagaacaaaac

SEQ ID NO: 1980 - RNA, 17 nt, Homo sapiens
acaacaaagaagcucca

SEQ ID NO: 1981 - RNA, 17 nt, Homo sapiens
aagcacaugggaaguga

SEQ ID NO: 1982 - RNA, 17 nt, Homo sapiens
agcacaugggaagugau

SEQ ID NO: 1983 - RNA, 17 nt, Homo sapiens
gcacaugggaagugauc

SEQ ID NO: 1984 - RNA, 17 nt, Homo sapiens
gauucugaggacuuuaa

SEQ ID NO: 1985 - RNA, 17 nt, Homo sapiens
auucugaggacuuuaag

SEQ ID NO: 1986 - RNA, 17 nt, Homo sapiens
gacuuuaagaaaaccac

SEQ ID NO: 1987 - RNA, 17 nt, Homo sapiens
uugcugcagauuggaca

SEQ ID NO: 1988 - RNA, 17 nt, Homo sapiens
ugcagauuggacaaaga

SEQ ID NO: 1989 - RNA, 17 nt, Homo sapiens
gcagauuggacaaagaa

SEQ ID NO: 1990 - RNA, 17 nt, Homo sapiens
uggacaaagaauugugu

SEQ ID NO: 1991 - RNA, 17 nt, Homo sapiens
acaaaucuggaagcaug

SEQ ID NO: 1992 - RNA, 17 nt, Homo sapiens
caaaucuggaagcaugg

SEQ ID NO: 1993 - RNA, 17 nt, Homo sapiens
ggaagcauggcgacugg

SEQ ID NO: 1994 - RNA, 17 nt, Homo sapiens
uggcgacugguaaccgc

SEQ ID NO: 1995 - RNA, 17 nt, Homo sapiens
aucaagcaggccagcuu

SEQ ID NO: 1996 - RNA, 17 nt, Homo sapiens
cugcugcagacaguuga

SEQ ID NO: 1997 - RNA, 17 nt, Homo sapiens
guugagcugggguccug

SEQ ID NO: 1998 - RNA, 17 nt, Homo sapiens
uugagcugggguccugg

SEQ ID NO: 1999 - RNA, 17 nt, Homo sapiens
ugagcugggguccuggg

SEQ ID NO: 2000 - RNA, 17 nt, Homo sapiens
gggguccuggguuggga

SEQ ID NO: 2001 - RNA, 17 nt, Homo sapiens
ggguccuggguugggau

SEQ ID NO: 2002 - RNA, 17 nt, Homo sapiens
ccuggguugggauggug

SEQ ID NO: 2003 - RNA, 17 nt, Homo sapiens
cuggguugggaugguga

SEQ ID NO: 2004 - RNA, 17 nt, Homo sapiens
uggguugggauggugac

SEQ ID NO: 2005 - RNA, 17 nt, Homo sapiens
guugggauggugacauu

SEQ ID NO: 2006 - RNA, 17 nt, Homo sapiens
cucauacagauaaacag

SEQ ID NO: 2007 - RNA, 17 nt, Homo sapiens
uaaacaguggcagugac

SEQ ID NO: 2008 - RNA, 17 nt, Homo sapiens
cagugacagggacacac

SEQ ID NO: 2009 - RNA, 17 nt, Homo sapiens
agugacagggacacacu

SEQ ID NO: 2010 - RNA, 17 nt, Homo sapiens
gugacagggacacacuc

SEQ ID NO: 2011 - RNA, 17 nt, Homo sapiens
cgccaaaagauuaccug

SEQ ID NO: 2012 - RNA, 17 nt, Homo sapiens
cagcuucaggagggacg

SEQ ID NO: 2013 - RNA, 17 nt, Homo sapiens
agcuucaggagggacgu

SEQ ID NO: 2014 - RNA, 17 nt, Homo sapiens
cuucaggagggacgucc

SEQ ID NO: 2015 - RNA, 17 nt, Homo sapiens
uucaggagggacgucca

SEQ ID NO: 2016 - RNA, 17 nt, Homo sapiens
ucaggagggacguccau

SEQ ID NO: 2017 - RNA, 17 nt, Homo sapiens
ucugcagcgggcuucga

SEQ ID NO: 2018 - RNA, 17 nt, Homo sapiens
cugcagcgggcuucgau

SEQ ID NO: 2019 - RNA, 17 nt, Homo sapiens
cuucgaucggcauuuac

SEQ ID NO: 2020 - RNA, 17 nt, Homo sapiens
ugugauuaggaagaaau

SEQ ID NO: 2021 - RNA, 17 nt, Homo sapiens
gugauuaggaagaaaua

SEQ ID NO: 2022 - RNA, 17 nt, Homo sapiens
auuaggaagaaauaucc

SEQ ID NO: 2023 - RNA, 17 nt, Homo sapiens
caacugauggaucugaa

SEQ ID NO: 2024 - RNA, 17 nt, Homo sapiens
aacugauggaucugaaa

SEQ ID NO: 2025 - RNA, 17 nt, Homo sapiens
cugcugacggaugggga

SEQ ID NO: 2026 - RNA, 17 nt, Homo sapiens
ugcugacggauggggaa

SEQ ID NO: 2027 - RNA, 17 nt, Homo sapiens
ugacggauggggaagac

SEQ ID NO: 2028 - RNA, 17 nt, Homo sapiens
gacggauggggaagaca

SEQ ID NO: 2029 - RNA, 17 nt, Homo sapiens
acggauggggaagacaa

SEQ ID NO: 2030 - RNA, 17 nt, Homo sapiens
cggauggggaagacaac

SEQ ID NO: 2031 - RNA, 17 nt, Homo sapiens
auggggaagacaacacu

SEQ ID NO: 2032 - RNA, 17 nt, Homo sapiens
cuauaagugggugcuuu

SEQ ID NO: 2033 - RNA, 17 nt, Homo sapiens
uauaagugggugcuuua

SEQ ID NO: 2034 - RNA, 17 nt, Homo sapiens
uuuaacgaggucaaaca

SEQ ID NO: 2035 - RNA, 17 nt, Homo sapiens
aacaaaguggugccauc

SEQ ID NO: 2036 - RNA, 17 nt, Homo sapiens
gucgcuuuggggcccuc

SEQ ID NO: 2037 - RNA, 17 nt, Homo sapiens
ucgcuuuggggcccucu

SEQ ID NO: 2038 - RNA, 17 nt, Homo sapiens
cgcuuuggggcccucug

SEQ ID NO: 2039 - RNA, 17 nt, Homo sapiens
cagcucaagaacuagag

SEQ ID NO: 2040 - RNA, 17 nt, Homo sapiens
aagaacuagaggagcug

SEQ ID NO: 2041 - RNA, 17 nt, Homo sapiens
gaacuagaggagcuguc

SEQ ID NO: 2042 - RNA, 17 nt, Homo sapiens
aacuagaggagcugucc

SEQ ID NO: 2043 - RNA, 17 nt, Homo sapiens
aaaugacaggagguuua

SEQ ID NO: 2044 - RNA, 17 nt, Homo sapiens
aaugacaggagguuuac

SEQ ID NO: 2045 - RNA, 17 nt, Homo sapiens
ugacaggagguuuacag

SEQ ID NO: 2046 - RNA, 17 nt, Homo sapiens
gguuuacagacauaugc

SEQ ID NO: 2047 - RNA, 17 nt, Homo sapiens
augcuucagaucaaguu

SEQ ID NO: 2048 - RNA, 17 nt, Homo sapiens
caaguucagaacaaugg

SEQ ID NO: 2049 - RNA, 17 nt, Homo sapiens
agaacaauggccucauu

SEQ ID NO: 2050 - RNA, 17 nt, Homo sapiens
augcuuuuggggcccuu

SEQ ID NO: 2051 - RNA, 17 nt, Homo sapiens
ugcuuuuggggcccuuu

SEQ ID NO: 2052 - RNA, 17 nt, Homo sapiens
gcuuuuggggcccuuuc

SEQ ID NO: 2053 - RNA, 17 nt, Homo sapiens
uuucaucaggaaaugga

SEQ ID NO: 2054 - RNA, 17 nt, Homo sapiens
uucaucaggaaauggag

SEQ ID NO: 2055 - RNA, 17 nt, Homo sapiens
caggaaauggagcuguc

SEQ ID NO: 2056 - RNA, 17 nt, Homo sapiens
aggaaauggagcugucu

SEQ ID NO: 2057 - RNA, 17 nt, Homo sapiens
cagcuugagaguaaggg

SEQ ID NO: 2058 - RNA, 17 nt, Homo sapiens
gagaguaagggauuaac

SEQ ID NO: 2059 - RNA, 17 nt, Homo sapiens
agaguaagggauuaacc

SEQ ID NO: 2060 - RNA, 17 nt, Homo sapiens
gaguaagggauuaaccc

SEQ ID NO: 2061 - RNA, 17 nt, Homo sapiens
acccuccagaacagcca

SEQ ID NO: 2062 - RNA, 17 nt, Homo sapiens
cagccaguggaugaaug

SEQ ID NO: 2063 - RNA, 17 nt, Homo sapiens
agccaguggaugaaugg

SEQ ID NO: 2064 - RNA, 17 nt, Homo sapiens
ggaugaauggcacagug

SEQ ID NO: 2065 - RNA, 17 nt, Homo sapiens
gugaucguggacagcac

SEQ ID NO: 2066 - RNA, 17 nt, Homo sapiens
ugaucguggacagcacc

SEQ ID NO: 2067 - RNA, 17 nt, Homo sapiens
agcaccgugggaaagga

SEQ ID NO: 2068 - RNA, 17 nt, Homo sapiens
gcaccgugggaaaggac

SEQ ID NO: 2069 - RNA, 17 nt, Homo sapiens
caccgugggaaaggaca

SEQ ID NO: 2070 - RNA, 17 nt, Homo sapiens
gugggaaaggacacuuu

SEQ ID NO: 2071 - RNA, 17 nt, Homo sapiens
ugggaaaggacacuuug

SEQ ID NO: 2072 - RNA, 17 nt, Homo sapiens
uaucaccuggacaacgc

SEQ ID NO: 2073 - RNA, 17 nt, Homo sapiens
aucaccuggacaacgca

SEQ ID NO: 2074 - RNA, 17 nt, Homo sapiens
ccuucucugggauccca

SEQ ID NO: 2075 - RNA, 17 nt, Homo sapiens
cuucucugggaucccag

SEQ ID NO: 2076 - RNA, 17 nt, Homo sapiens
uucucugggaucccagu

SEQ ID NO: 2077 - RNA, 17 nt, Homo sapiens
aucccaguggacagaag

SEQ ID NO: 2078 - RNA, 17 nt, Homo sapiens
ucccaguggacagaagc

SEQ ID NO: 2079 - RNA, 17 nt, Homo sapiens
aguggacagaagcaagg

SEQ ID NO: 2080 - RNA, 17 nt, Homo sapiens
agaagcaagguggcuuu

SEQ ID NO: 2081 - RNA, 17 nt, Homo sapiens
agcaagguggcuuugua

SEQ ID NO: 2082 - RNA, 17 nt, Homo sapiens
uuuguaguggacaaaaa

SEQ ID NO: 2083 - RNA, 17 nt, Homo sapiens
uuguaguggacaaaaac

SEQ ID NO: 2084 - RNA, 17 nt, Homo sapiens
accaaaauggccuaccu

SEQ ID NO: 2085 - RNA, 17 nt, Homo sapiens
aaaucccaggcauugcu

SEQ ID NO: 2086 - RNA, 17 nt, Homo sapiens
auugcuaagguuggcac

SEQ ID NO: 2087 - RNA, 17 nt, Homo sapiens
cuaagguuggcacuugg

SEQ ID NO: 2088 - RNA, 17 nt, Homo sapiens
uggcacuuggaaauaca

SEQ ID NO: 2089 - RNA, 17 nt, Homo sapiens
ggcacuuggaaauacag

SEQ ID NO: 2090 - RNA, 17 nt, Homo sapiens
acgaacaaggacaccag

SEQ ID NO: 2091 - RNA, 17 nt, Homo sapiens
cgaacaaggacaccagc

SEQ ID NO: 2092 - RNA, 17 nt, Homo sapiens
agcccucugguaguuua

SEQ ID NO: 2093 - RNA, 17 nt, Homo sapiens
uucgccaaggagccucc

SEQ ID NO: 2094 - RNA, 17 nt, Homo sapiens
ucgccaaggagccuccc

SEQ ID NO: 2095 - RNA, 17 nt, Homo sapiens
aauucucagggccagug

SEQ ID NO: 2096 - RNA, 17 nt, Homo sapiens
auucucagggccagugu

SEQ ID NO: 2097 - RNA, 17 nt, Homo sapiens
cagugaauggaaaaaca

SEQ ID NO: 2098 - RNA, 17 nt, Homo sapiens
agugaauggaaaaacag

SEQ ID NO: 2099 - RNA, 17 nt, Homo sapiens
guuaccuuggaacuacu

SEQ ID NO: 2100 - RNA, 17 nt, Homo sapiens
uuaccuuggaacuacug

SEQ ID NO: 2101 - RNA, 17 nt, Homo sapiens
gaacuacuggauaaugg

SEQ ID NO: 2102 - RNA, 17 nt, Homo sapiens
aacuacuggauaaugga

SEQ ID NO: 2103 - RNA, 17 nt, Homo sapiens
uggauaauggagcaggu

SEQ ID NO: 2104 - RNA, 17 nt, Homo sapiens
ggauaauggagcaggug

SEQ ID NO: 2105 - RNA, 17 nt, Homo sapiens
auggagcaggugcugau

SEQ ID NO: 2106 - RNA, 17 nt, Homo sapiens
gcuacuaaggaugacgg

SEQ ID NO: 2107 - RNA, 17 nt, Homo sapiens
cuacuaaggaugacggu

SEQ ID NO: 2108 - RNA, 17 nt, Homo sapiens
aggaugacggugucuac

SEQ ID NO: 2109 - RNA, 17 nt, Homo sapiens
cuacucaagguauuuca

SEQ ID NO: 2110 - RNA, 17 nt, Homo sapiens
acacgaaugguagauac

SEQ ID NO: 2111 - RNA, 17 nt, Homo sapiens
gaaugguagauacagug

SEQ ID NO: 2112 - RNA, 17 nt, Homo sapiens
aaaagugcgggcucugg

SEQ ID NO: 2113 - RNA, 17 nt, Homo sapiens
aaagugcgggcucuggg

SEQ ID NO: 2114 - RNA, 17 nt, Homo sapiens
cgggcucugggaggagu

SEQ ID NO: 2115 - RNA, 17 nt, Homo sapiens
gggcucugggaggaguu

SEQ ID NO: 2116 - RNA, 17 nt, Homo sapiens
ggcucugggaggaguua

SEQ ID NO: 2117 - RNA, 17 nt, Homo sapiens
cucugggaggaguuaac

SEQ ID NO: 2118 - RNA, 17 nt, Homo sapiens
ucugggaggaguuaacg

SEQ ID NO: 2119 - RNA, 17 nt, Homo sapiens
cgcagccagacggagag

SEQ ID NO: 2120 - RNA, 17 nt, Homo sapiens
agccagacggagaguga

SEQ ID NO: 2121 - RNA, 17 nt, Homo sapiens
gccagacggagagugau

SEQ ID NO: 2122 - RNA, 17 nt, Homo sapiens
cagacggagagugauac

SEQ ID NO: 2123 - RNA, 17 nt, Homo sapiens
ccccagcagaguggagc

SEQ ID NO: 2124 - RNA, 17 nt, Homo sapiens
agcagaguggagcacug

SEQ ID NO: 2125 - RNA, 17 nt, Homo sapiens
gcagaguggagcacugu

SEQ ID NO: 2126 - RNA, 17 nt, Homo sapiens
acauaccuggcuggauu

SEQ ID NO: 2127 - RNA, 17 nt, Homo sapiens
accuggcuggauugaga

SEQ ID NO: 2128 - RNA, 17 nt, Homo sapiens
ccuggcuggauugagaa

SEQ ID NO: 2129 - RNA, 17 nt, Homo sapiens
uggauugagaaugauga

SEQ ID NO: 2130 - RNA, 17 nt, Homo sapiens
aauacaauggaauccac

SEQ ID NO: 2131 - RNA, 17 nt, Homo sapiens
auacaauggaauccacc

SEQ ID NO: 2132 - RNA, 17 nt, Homo sapiens
uccaccaagaccugaaa

SEQ ID NO: 2133 - RNA, 17 nt, Homo sapiens
auuaauaaggaugaugu

SEQ ID NO: 2134 - RNA, 17 nt, Homo sapiens
uuaauaaggaugauguu

SEQ ID NO: 2135 - RNA, 17 nt, Homo sapiens
uuucagcagaacauccu

SEQ ID NO: 2136 - RNA, 17 nt, Homo sapiens
acauccucgggaggcuc

SEQ ID NO: 2137 - RNA, 17 nt, Homo sapiens
cauccucgggaggcuca

SEQ ID NO: 2138 - RNA, 17 nt, Homo sapiens
auccucgggaggcucau

SEQ ID NO: 2139 - RNA, 17 nt, Homo sapiens
ccucgggaggcucauuu

SEQ ID NO: 2140 - RNA, 17 nt, Homo sapiens
ucauuuguggcuucuga

SEQ ID NO: 2141 - RNA, 17 nt, Homo sapiens
ucccaccuggccaaauc

SEQ ID NO: 2142 - RNA, 17 nt, Homo sapiens
gaccugaaggcggaaau

SEQ ID NO: 2143 - RNA, 17 nt, Homo sapiens
cugaaggcggaaauuca

SEQ ID NO: 2144 - RNA, 17 nt, Homo sapiens
ugaaggcggaaauucac

SEQ ID NO: 2145 - RNA, 17 nt, Homo sapiens
aaauucacgggggcagu

SEQ ID NO: 2146 - RNA, 17 nt, Homo sapiens
aauucacgggggcaguc

SEQ ID NO: 2147 - RNA, 17 nt, Homo sapiens
auucacgggggcagucu

SEQ ID NO: 2148 - RNA, 17 nt, Homo sapiens
uucacgggggcagucuc

SEQ ID NO: 2149 - RNA, 17 nt, Homo sapiens
ucugacuuggacagcuc

SEQ ID NO: 2150 - RNA, 17 nt, Homo sapiens
cugacuuggacagcucc

SEQ ID NO: 2151 - RNA, 17 nt, Homo sapiens
cagcuccuggggaugau

SEQ ID NO: 2152 - RNA, 17 nt, Homo sapiens
agcuccuggggaugauu

SEQ ID NO: 2153 - RNA, 17 nt, Homo sapiens
gcuccuggggaugauua

SEQ ID NO: 2154 - RNA, 17 nt, Homo sapiens
cuccuggggaugauuau

SEQ ID NO: 2155 - RNA, 17 nt, Homo sapiens
augaccauggaacagcu

SEQ ID NO: 2156 - RNA, 17 nt, Homo sapiens
ugaccauggaacagcuc

SEQ ID NO: 2157 - RNA, 17 nt, Homo sapiens
ugaucucagagacaagu

SEQ ID NO: 2158 - RNA, 17 nt, Homo sapiens
aucucagagacaaguuc

SEQ ID NO: 2159 - RNA, 17 nt, Homo sapiens
aucccaaaggaagccaa

SEQ ID NO: 2160 - RNA, 17 nt, Homo sapiens
ucccaaaggaagccaac

SEQ ID NO: 2161 - RNA, 17 nt, Homo sapiens
aacucugaggaagucuu

SEQ ID NO: 2162 - RNA, 17 nt, Homo sapiens
acucugaggaagucuuu

SEQ ID NO: 2163 - RNA, 17 nt, Homo sapiens
uuaaaccagaaaacauu

SEQ ID NO: 2164 - RNA, 17 nt, Homo sapiens
uugaaaauggcacagau

SEQ ID NO: 2165 - RNA, 17 nt, Homo sapiens
auggcacagaucuuuuc

SEQ ID NO: 2166 - RNA, 17 nt, Homo sapiens
gcuauucaggcuguuga

SEQ ID NO: 2167 - RNA, 17 nt, Homo sapiens
guugauaaggucgaucu

SEQ ID NO: 2168 - RNA, 17 nt, Homo sapiens
ugaaaucagaaauaucc

SEQ ID NO: 2169 - RNA, 17 nt, Homo sapiens
ccuccacagacuccgcc

SEQ ID NO: 2170 - RNA, 17 nt, Homo sapiens
cuccgccagagacaccu

SEQ ID NO: 2171 - RNA, 17 nt, Homo sapiens
ccgccagagacaccuag

SEQ ID NO: 2172 - RNA, 17 nt, Homo sapiens
ccauuccuggcauucac

SEQ ID NO: 2173 - RNA, 17 nt, Homo sapiens
aauuauguggaagugga

SEQ ID NO: 2174 - RNA, 17 nt, Homo sapiens
auuauguggaaguggau

SEQ ID NO: 2175 - RNA, 17 nt, Homo sapiens
guggaaguggauaggag

SEQ ID NO: 2176 - RNA, 17 nt, Homo sapiens
uggaaguggauaggaga

SEQ ID NO: 2177 - RNA, 17 nt, Homo sapiens
aguggauaggagaacug

SEQ ID NO: 2178 - RNA, 17 nt, Homo sapiens
guggauaggagaacugc

SEQ ID NO: 2179 - RNA, 17 nt, Homo sapiens
ggauaggagaacugcag

SEQ ID NO: 2180 - RNA, 17 nt, Homo sapiens
auagccuagggcugaau

SEQ ID NO: 2181 - RNA, 17 nt, Homo sapiens
uagccuagggcugaauu

SEQ ID NO: 2182 - RNA, 17 nt, Homo sapiens
uuuugucagauaaauaa

SEQ ID NO: 2183 - RNA, 17 nt, Homo sapiens
guauuuuagacuuccug

SEQ ID NO: 2184 - RNA, 17 nt, Homo sapiens
uuccuguagggggcgau

SEQ ID NO: 2185 - RNA, 17 nt, Homo sapiens
uccuguagggggcgaua

SEQ ID NO: 2186 - RNA, 17 nt, Homo sapiens
ccuguagggggcgauau

SEQ ID NO: 2187 - RNA, 17 nt, Homo sapiens
cuguagggggcgauaua

SEQ ID NO: 2188 - RNA, 17 nt, Homo sapiens
ccuguagggggcgauaa

SEQ ID NO: 2189 - RNA, 17 nt, Homo sapiens
cuguagggggcgauaaa

SEQ ID NO: 2190 - RNA, 38 nt, Artificial Sequence
  Description of Artificial Sequence:  Enzymatic Nucleic Acid
uguaccaacugaugaggccguuaggccgaaagcauuag

SEQ ID NO: 2191 - RNA, 38 nt, Artificial Sequence
  Description of Artificial Sequence:  Enzymatic Nucleic Acid
uuguaccacugaugaggccguuaggccgaaaagcauua

SEQ ID NO: 2192 - RNA, 38 nt, Artificial Sequence
  Description of Artificial Sequence:  Enzymatic Nucleic Acid
uuuguacccugaugaggccguuaggccgaaaaagcauu

SEQ ID NO: 2193 - RNA, 38 nt, Artificial Sequence
  Description of Artificial Sequence:  Enzymatic Nucleic Acid
uccauuugcugaugaggccguuaggccgaaaccaaaag

SEQ ID NO: 2194 - RNA, 38 nt, Artificial Sequence
  Description of Artificial Sequence:  Enzymatic Nucleic Acid
uucaauuacugaugaggccguuaggccgaaauuccaca

SEQ ID NO: 2195 - RNA, 38 nt, Artificial Sequence
  Description of Artificial Sequence:  Enzymatic Nucleic Acid
uauucaaucugaugaggccguuaggccgaaauauucca

SEQ ID NO: 2196 - RNA, 38 nt, Artificial Sequence
  Description of Artificial Sequence:  Enzymatic Nucleic Acid
aaauauuccugaugaggccguuaggccgaaauuauauu

SEQ ID NO: 2197 - RNA, 38 nt, Artificial Sequence
  Description of Artificial Sequence:  Enzymatic Nucleic Acid
caagaaaacugaugaggccguuaggccgaaauucaauu

SEQ ID NO: 2198 - RNA, 38 nt, Artificial Sequence
  Description of Artificial Sequence:  Enzymatic Nucleic Acid
aacaagaacugaugaggccguuaggccgaaauauucaa

SEQ ID NO: 2199 - RNA, 38 nt, Artificial Sequence
  Description of Artificial Sequence:  Enzymatic Nucleic Acid
aaacaagacugaugaggccguuaggccgaaaauauuca

SEQ ID NO: 2200 - RNA, 38 nt, Artificial Sequence
  Description of Artificial Sequence:  Enzymatic Nucleic Acid
uaaacaagcugaugaggccguuaggccgaaaaauauuc

SEQ ID NO: 2201 - RNA, 38 nt, Artificial Sequence
  Description of Artificial Sequence:  Enzymatic Nucleic Acid
uuaaacaacugaugaggccguuaggccgaaaaaauauu

SEQ ID NO: 2202 - RNA, 38 nt, Artificial Sequence
  Description of Artificial Sequence:  Enzymatic Nucleic Acid
ccuuaaaccugaugaggccguuaggccgaaagaaaaua

SEQ ID NO: 2203 - RNA, 38 nt, Artificial Sequence
  Description of Artificial Sequence:  Enzymatic Nucleic Acid
uccccuuacugaugaggccguuaggccgaaacaagaaa

SEQ ID NO: 2204 - RNA, 38 nt, Artificial Sequence
  Description of Artificial Sequence:  Enzymatic Nucleic Acid
cuccccuucugaugaggccguuaggccgaaaacaagaa

SEQ ID NO: 2205 - RNA, 38 nt, Artificial Sequence
  Description of Artificial Sequence:  Enzymatic Nucleic Acid
gcuccccucugaugaggccguuaggccgaaaaacaaga

SEQ ID NO: 2206 - RNA, 38 nt, Artificial Sequence
  Description of Artificial Sequence:  Enzymatic Nucleic Acid
auaaccuccugaugaggccguuaggccgaaacaccucu

SEQ ID NO: 2207 - RNA, 38 nt, Artificial Sequence
  Description of Artificial Sequence:  Enzymatic Nucleic Acid
cuugacaucugaugaggccguuaggccgaaaccucaac

SEQ ID NO: 2208 - RNA, 38 nt, Artificial Sequence
  Description of Artificial Sequence:  Enzymatic Nucleic Acid
gcuugacacugaugaggccguuaggccgaaaaccucaa

SEQ ID NO: 2209 - RNA, 38 nt, Artificial Sequence
  Description of Artificial Sequence:  Enzymatic Nucleic Acid
agaugcuucugaugaggccguuaggccgaaacauaacc

SEQ ID NO: 2210 - RNA, 38 nt, Artificial Sequence
  Description of Artificial Sequence:  Enzymatic Nucleic Acid
cugugccacugaugaggccguuaggccgaaaugcuuga

SEQ ID NO: 2211 - RNA, 38 nt, Artificial Sequence
  Description of Artificial Sequence:  Enzymatic Nucleic Acid
cuuguaaacugaugaggccguuaggccgaaauuuccau

SEQ ID NO: 2212 - RNA, 38 nt, Artificial Sequence
  Description of Artificial Sequence:  Enzymatic Nucleic Acid
uacuuguacugaugaggccguuaggccgaaauauuucc

SEQ ID NO: 2213 - RNA, 38 nt, Artificial Sequence
  Description of Artificial Sequence:  Enzymatic Nucleic Acid
guacuugucugaugaggccguuaggccgaaaauauuuc

SEQ ID NO: 2214 - RNA, 38 nt, Artificial Sequence
  Description of Artificial Sequence:  Enzymatic Nucleic Acid
cguacuugcugaugaggccguuaggccgaaaaauauuu

SEQ ID NO: 2215 - RNA, 38 nt, Artificial Sequence
  Description of Artificial Sequence:  Enzymatic Nucleic Acid
aaauugcgcugaugaggccguuaggccgaaacuuguaa

SEQ ID NO: 2216 - RNA, 38 nt, Artificial Sequence
  Description of Artificial Sequence:  Enzymatic Nucleic Acid
uagucucacugaugaggccguuaggccgaaauugcgua

SEQ ID NO: 2217 - RNA, 38 nt, Artificial Sequence
  Description of Artificial Sequence:  Enzymatic Nucleic Acid
uuagucuccugaugaggccguuaggccgaaaauugcgu

SEQ ID NO: 2218 - RNA, 38 nt, Artificial Sequence
  Description of Artificial Sequence:  Enzymatic Nucleic Acid
caauaucucugaugaggccguuaggccgaaagucucaa

SEQ ID NO: 2219 - RNA, 38 nt, Artificial Sequence
  Description of Artificial Sequence:  Enzymatic Nucleic Acid
gauaacaacugaugaggccguuaggccgaaaucuuagu

SEQ ID NO: 2220 - RNA, 38 nt, Artificial Sequence
  Description of Artificial Sequence:  Enzymatic Nucleic Acid
augauaaccugaugaggccguuaggccgaaauaucuua

SEQ ID NO: 2221 - RNA, 38 nt, Artificial Sequence
  Description of Artificial Sequence:  Enzymatic Nucleic Acid
agaaugaucugaugaggccguuaggccgaaacaauauc

SEQ ID NO: 2222 - RNA, 38 nt, Artificial Sequence
  Description of Artificial Sequence:  Enzymatic Nucleic Acid
gagaaugacugaugaggccguuaggccgaaaacaauau

SEQ ID NO: 2223 - RNA, 38 nt, Artificial Sequence
  Description of Artificial Sequence:  Enzymatic Nucleic Acid
aggagaaucugaugaggccguuaggccgaaauaacaau

SEQ ID NO: 2224 - RNA, 38 nt, Artificial Sequence
  Description of Artificial Sequence:  Enzymatic Nucleic Acid
aauaggagcugaugaggccguuaggccgaaaugauaac

SEQ ID NO: 2225 - RNA, 38 nt, Artificial Sequence
  Description of Artificial Sequence:  Enzymatic Nucleic Acid
caauaggacugaugaggccguuaggccgaaaaugauaa

SEQ ID NO: 2226 - RNA, 38 nt, Artificial Sequence
  Description of Artificial Sequence:  Enzymatic Nucleic Acid
uucaauagcugaugaggccguuaggccgaaagaaugau

SEQ ID NO: 2227 - RNA, 38 nt, Artificial Sequence
  Description of Artificial Sequence:  Enzymatic Nucleic Acid
gucuucaacugaugaggccguuaggccgaaaggagaau

SEQ ID NO: 2228 - RNA, 38 nt, Artificial Sequence
  Description of Artificial Sequence:  Enzymatic Nucleic Acid
uugucuuccugaugaggccguuaggccgaaauaggaga

SEQ ID NO: 2229 - RNA, 38 nt, Artificial Sequence
  Description of Artificial Sequence:  Enzymatic Nucleic Acid
uguuuuaccugaugaggccguuaggccgaaauugcucu

SEQ ID NO: 2230 - RNA, 38 nt, Artificial Sequence
  Description of Artificial Sequence:  Enzymatic Nucleic Acid
auguguuucugaugaggccguuaggccgaaacuauugc

SEQ ID NO: 2231 - RNA, 38 nt, Artificial Sequence
  Description of Artificial Sequence:  Enzymatic Nucleic Acid
ccugaccucugaugaggccguuaggccgaaauguguuu

SEQ ID NO: 2232 - RNA, 38 nt, Artificial Sequence
  Description of Artificial Sequence:  Enzymatic Nucleic Acid
aacccccucugaugaggccguuaggccgaaaccugaug

SEQ ID NO: 2233 - RNA, 38 nt, Artificial Sequence
  Description of Artificial Sequence:  Enzymatic Nucleic Acid
aggucuuucugaugaggccguuaggccgaaacccccug

SEQ ID NO: 2234 - RNA, 38 nt, Artificial Sequence
  Description of Artificial Sequence:  Enzymatic Nucleic Acid
caggucuucugaugaggccguuaggccgaaaacccccu

SEQ ID NO: 2235 - RNA, 38 nt, Artificial Sequence
  Description of Artificial Sequence:  Enzymatic Nucleic Acid
aagugguucugaugaggccguuaggccgaaaucacagg

SEQ ID NO: 2236 - RNA, 38 nt, Artificial Sequence
  Description of Artificial Sequence:  Enzymatic Nucleic Acid
cuuaucggcugaugaggccguuaggccgaaagugguuu

SEQ ID NO: 2237 - RNA, 38 nt, Artificial Sequence
  Description of Artificial Sequence:  Enzymatic Nucleic Acid
acuuaucgcugaugaggccguuaggccgaaaagugguu

SEQ ID NO: 2238 - RNA, 38 nt, Artificial Sequence
  Description of Artificial Sequence:  Enzymatic Nucleic Acid
uuccaacucugaugaggccguuaggccgaaaucggaag

SEQ ID NO: 2239 - RNA, 38 nt, Artificial Sequence
  Description of Artificial Sequence:  Enzymatic Nucleic Acid
acguuucccugaugaggccguuaggccgaaacuuaucg

SEQ ID NO: 2240 - RNA, 38 nt, Artificial Sequence
  Description of Artificial Sequence:  Enzymatic Nucleic Acid
aaaauauacugaugaggccguuaggccgaaacacacgu

SEQ ID NO: 2241 - RNA, 38 nt, Artificial Sequence
  Description of Artificial Sequence:  Enzymatic Nucleic Acid
ugaaaauacugaugaggccguuaggccgaaagacacac

SEQ ID NO: 2242 - RNA, 38 nt, Artificial Sequence
  Description of Artificial Sequence:  Enzymatic Nucleic Acid
uaugaaaacugaugaggccguuaggccgaaauagacac

SEQ ID NO: 2243 - RNA, 38 nt, Artificial Sequence
  Description of Artificial Sequence:  Enzymatic Nucleic Acid
gauaugaacugaugaggccguuaggccgaaauauagac

SEQ ID NO: 2244 - RNA, 38 nt, Artificial Sequence
  Description of Artificial Sequence:  Enzymatic Nucleic Acid
agauaugacugaugaggccguuaggccgaaaauauaga

SEQ ID NO: 2245 - RNA, 38 nt, Artificial Sequence
  Description of Artificial Sequence:  Enzymatic Nucleic Acid
cagauaugcugaugaggccguuaggccgaaaaauauag

SEQ ID NO: 2246 - RNA, 38 nt, Artificial Sequence
  Description of Artificial Sequence:  Enzymatic Nucleic Acid
acagauaucugaugaggccguuaggccgaaaaaauaua

SEQ ID NO: 2247 - RNA, 38 nt, Artificial Sequence
  Description of Artificial Sequence:  Enzymatic Nucleic Acid
uauacagacugaugaggccguuaggccgaaaugaaaau

SEQ ID NO: 2248 - RNA, 38 nt, Artificial Sequence
  Description of Artificial Sequence:  Enzymatic Nucleic Acid
uauauacacugaugaggccguuaggccgaaauaugaaa

SEQ ID NO: 2249 - RNA, 38 nt, Artificial Sequence
  Description of Artificial Sequence:  Enzymatic Nucleic Acid
uauauauacugaugaggccguuaggccgaaacagauau

SEQ ID NO: 2250 - RNA, 38 nt, Artificial Sequence
  Description of Artificial Sequence:  Enzymatic Nucleic Acid
auuauauacugaugaggccguuaggccgaaauacagau

SEQ ID NO: 2251 - RNA, 38 nt, Artificial Sequence
  Description of Artificial Sequence:  Enzymatic Nucleic Acid
ccauuauacugaugaggccguuaggccgaaauauacag

SEQ ID NO: 2252 - RNA, 38 nt, Artificial Sequence
  Description of Artificial Sequence:  Enzymatic Nucleic Acid
uaccauuacugaugaggccguuaggccgaaauauauac

SEQ ID NO: 2253 - RNA, 38 nt, Artificial Sequence
  Description of Artificial Sequence:  Enzymatic Nucleic Acid
uuuaccaucugaugaggccguuaggccgaaauauauau

SEQ ID NO: 2254 - RNA, 38 nt, Artificial Sequence
  Description of Artificial Sequence:  Enzymatic Nucleic Acid
ucuuucuucugaugaggccguuaggccgaaaccauuau

SEQ ID NO: 2255 - RNA, 38 nt, Artificial Sequence
  Description of Artificial Sequence:  Enzymatic Nucleic Acid
ggguuacgcugaugaggccguuaggccgaaaggugucu

SEQ ID NO: 2256 - RNA, 38 nt, Artificial Sequence
  Description of Artificial Sequence:  Enzymatic Nucleic Acid
cggguuaccugaugaggccguuaggccgaaaagguguc

SEQ ID NO: 2257 - RNA, 38 nt, Artificial Sequence
  Description of Artificial Sequence:  Enzymatic Nucleic Acid
augcgggucugaugaggccguuaggccgaaacgaaggu

SEQ ID NO: 2258 - RNA, 38 nt, Artificial Sequence
  Description of Artificial Sequence:  Enzymatic Nucleic Acid
cuuuggaacugaugaggccguuaggccgaaaugcgggu

SEQ ID NO: 2259 - RNA, 38 nt, Artificial Sequence
  Description of Artificial Sequence:  Enzymatic Nucleic Acid
ucuuuggacugaugaggccguuaggccgaaaaugcggg

SEQ ID NO: 2260 - RNA, 38 nt, Artificial Sequence
  Description of Artificial Sequence:  Enzymatic Nucleic Acid
cucuuuggcugaugaggccguuaggccgaaaaaugcgg

SEQ ID NO: 2261 - RNA, 38 nt, Artificial Sequence
  Description of Artificial Sequence:  Enzymatic Nucleic Acid
ucucuuugcugaugaggccguuaggccgaaaaaaugcg

SEQ ID NO: 2262 - RNA, 38 nt, Artificial Sequence
  Description of Artificial Sequence:  Enzymatic Nucleic Acid
cucccugucugaugaggccguuaggccgaaauuccucu

SEQ ID NO: 2263 - RNA, 38 nt, Artificial Sequence
  Description of Artificial Sequence:  Enzymatic Nucleic Acid
cauugcugcugaugaggccguuaggccgaaacaucucc

SEQ ID NO: 2264 - RNA, 38 nt, Artificial Sequence
  Description of Artificial Sequence:  Enzymatic Nucleic Acid
aacucuuacugaugaggccguuaggccgaaauggcccc

SEQ ID NO: 2265 - RNA, 38 nt, Artificial Sequence
  Description of Artificial Sequence:  Enzymatic Nucleic Acid
gaacucuucugaugaggccguuaggccgaaaauggccc

SEQ ID NO: 2266 - RNA, 38 nt, Artificial Sequence
  Description of Artificial Sequence:  Enzymatic Nucleic Acid
agaacucucugaugaggccguuaggccgaaaaauggcc

SEQ ID NO: 2267 - RNA, 38 nt, Artificial Sequence
  Description of Artificial Sequence:  Enzymatic Nucleic Acid
gaacacagcugaugaggccguuaggccgaaacucuuaa

SEQ ID NO: 2268 - RNA, 38 nt, Artificial Sequence
  Description of Artificial Sequence:  Enzymatic Nucleic Acid
ugaacacacugaugaggccguuaggccgaaaacucuua

SEQ ID NO: 2269 - RNA, 38 nt, Artificial Sequence
  Description of Artificial Sequence:  Enzymatic Nucleic Acid
ucaagaugcugaugaggccguuaggccgaaacacagaa

SEQ ID NO: 2270 - RNA, 38 nt, Artificial Sequence
  Description of Artificial Sequence:  Enzymatic Nucleic Acid
aucaagaucugaugaggccguuaggccgaaaacacaga

SEQ ID NO: 2271 - RNA, 38 nt, Artificial Sequence
  Description of Artificial Sequence:  Enzymatic Nucleic Acid
agaaucaacugaugaggccguuaggccgaaaugaacac

SEQ ID NO: 2272 - RNA, 38 nt, Artificial Sequence
  Description of Artificial Sequence:  Enzymatic Nucleic Acid
gaagaauccugaugaggccguuaggccgaaagaugaac

SEQ ID NO: 2273 - RNA, 38 nt, Artificial Sequence
  Description of Artificial Sequence:  Enzymatic Nucleic Acid
aggugaagcugaugaggccguuaggccgaaaucaagau

SEQ ID NO: 2274 - RNA, 38 nt, Artificial Sequence
  Description of Artificial Sequence:  Enzymatic Nucleic Acid
aaggugaacugaugaggccguuaggccgaaaaucaaga

SEQ ID NO: 2275 - RNA, 38 nt, Artificial Sequence
  Description of Artificial Sequence:  Enzymatic Nucleic Acid
agaaggugcugaugaggccguuaggccgaaagaaucaa

SEQ ID NO: 2276 - RNA, 38 nt, Artificial Sequence
  Description of Artificial Sequence:  Enzymatic Nucleic Acid
uagaaggucugaugaggccguuaggccgaaaagaauca

SEQ ID NO: 2277 - RNA, 38 nt, Artificial Sequence
  Description of Artificial Sequence:  Enzymatic Nucleic Acid
ccuucuagcugaugaggccguuaggccgaaaggugaag

SEQ ID NO: 2278 - RNA, 38 nt, Artificial Sequence
  Description of Artificial Sequence:  Enzymatic Nucleic Acid
cccuucuacugaugaggccguuaggccgaaaaggugaa

SEQ ID NO: 2279 - RNA, 38 nt, Artificial Sequence
  Description of Artificial Sequence:  Enzymatic Nucleic Acid
gccccuuccugaugaggccguuaggccgaaagaaggug

SEQ ID NO: 2280 - RNA, 38 nt, Artificial Sequence
  Description of Artificial Sequence:  Enzymatic Nucleic Acid
gagugaaucugaugaggccguuaggccgaaacucaggg

SEQ ID NO: 2281 - RNA, 38 nt, Artificial Sequence
  Description of Artificial Sequence:  Enzymatic Nucleic Acid
aaugagugcugaugaggccguuaggccgaaauuacuca

SEQ ID NO: 2282 - RNA, 38 nt, Artificial Sequence
  Description of Artificial Sequence:  Enzymatic Nucleic Acid
gaaugagucugaugaggccguuaggccgaaaauuacuc

SEQ ID NO: 2283 - RNA, 38 nt, Artificial Sequence
  Description of Artificial Sequence:  Enzymatic Nucleic Acid
agcugaaucugaugaggccguuaggccgaaagugaauu

SEQ ID NO: 2284 - RNA, 38 nt, Artificial Sequence
  Description of Artificial Sequence:  Enzymatic Nucleic Acid
uucagcugcugaugaggccguuaggccgaaaugaguga

SEQ ID NO: 2285 - RNA, 38 nt, Artificial Sequence
  Description of Artificial Sequence:  Enzymatic Nucleic Acid
guucagcucugaugaggccguuaggccgaaaaugagug

SEQ ID NO: 2286 - RNA, 38 nt, Artificial Sequence
  Description of Artificial Sequence:  Enzymatic Nucleic Acid
ugccuucacugaugaggccguuaggccgaaagccauug

SEQ ID NO: 2287 - RNA, 38 nt, Artificial Sequence
  Description of Artificial Sequence:  Enzymatic Nucleic Acid
gcaacgaccugaugaggccguuaggccgaaaugccuuc

SEQ ID NO: 2288 - RNA, 38 nt, Artificial Sequence
  Description of Artificial Sequence:  Enzymatic Nucleic Acid
auugcaaccugaugaggccguuaggccgaaacaaugcc

SEQ ID NO: 2289 - RNA, 38 nt, Artificial Sequence
  Description of Artificial Sequence:  Enzymatic Nucleic Acid
ucgauugccugaugaggccguuaggccgaaacgacaau

SEQ ID NO: 2290 - RNA, 38 nt, Artificial Sequence
  Description of Artificial Sequence:  Enzymatic Nucleic Acid
uugggguccugaugaggccguuaggccgaaauugcaac

SEQ ID NO: 2291 - RNA, 38 nt, Artificial Sequence
  Description of Artificial Sequence:  Enzymatic Nucleic Acid
uguugaaucugaugaggccguuaggccgaaaguguuuc

SEQ ID NO: 2292 - RNA, 38 nt, Artificial Sequence
  Description of Artificial Sequence:  Enzymatic Nucleic Acid
auuuguugcugaugaggccguuaggccgaaaugagugu

SEQ ID NO: 2293 - RNA, 38 nt, Artificial Sequence
  Description of Artificial Sequence:  Enzymatic Nucleic Acid
uauuuguucugaugaggccguuaggccgaaaaugagug

SEQ ID NO: 2294 - RNA, 38 nt, Artificial Sequence
  Description of Artificial Sequence:  Enzymatic Nucleic Acid
auguccuucugaugaggccguuaggccgaaauuuguug

SEQ ID NO: 2295 - RNA, 38 nt, Artificial Sequence
  Description of Artificial Sequence:  Enzymatic Nucleic Acid
gauacagacugaugaggccguuaggccgaaaugccugg

SEQ ID NO: 2296 - RNA, 38 nt, Artificial Sequence
  Description of Artificial Sequence:  Enzymatic Nucleic Acid
cagauacacugaugaggccguuaggccgaaagaugccu

SEQ ID NO: 2297 - RNA, 38 nt, Artificial Sequence
  Description of Artificial Sequence:  Enzymatic Nucleic Acid
caaacagacugaugaggccguuaggccgaaacagagau

SEQ ID NO: 2298 - RNA, 38 nt, Artificial Sequence
  Description of Artificial Sequence:  Enzymatic Nucleic Acid
uucaaacacugaugaggccguuaggccgaaauacagag

SEQ ID NO: 2299 - RNA, 38 nt, Artificial Sequence
  Description of Artificial Sequence:  Enzymatic Nucleic Acid
uagcuucacugaugaggccguuaggccgaaacagauac

SEQ ID NO: 2300 - RNA, 38 nt, Artificial Sequence
  Description of Artificial Sequence:  Enzymatic Nucleic Acid
guagcuuccugaugaggccguuaggccgaaaacagaua

SEQ ID NO: 2301 - RNA, 38 nt, Artificial Sequence
  Description of Artificial Sequence:  Enzymatic Nucleic Acid
cuuuccugcugaugaggccguuaggccgaaagcuucaa

SEQ ID NO: 2302 - RNA, 38 nt, Artificial Sequence
  Description of Artificial Sequence:  Enzymatic Nucleic Acid
ugaaauaacugaugaggccguuaggccgaaaucgcuuu

SEQ ID NO: 2303 - RNA, 38 nt, Artificial Sequence
  Description of Artificial Sequence:  Enzymatic Nucleic Acid
uugaaauacugaugaggccguuaggccgaaaaucgcuu

SEQ ID NO: 2304 - RNA, 38 nt, Artificial Sequence
  Description of Artificial Sequence:  Enzymatic Nucleic Acid
uuugaaaucugaugaggccguuaggccgaaaaaucgcu

SEQ ID NO: 2305 - RNA, 38 nt, Artificial Sequence
  Description of Artificial Sequence:  Enzymatic Nucleic Acid
uuuugaaacugaugaggccguuaggccgaaaaaaucgc

SEQ ID NO: 2306 - RNA, 38 nt, Artificial Sequence
  Description of Artificial Sequence:  Enzymatic Nucleic Acid
auuuuugacugaugaggccguuaggccgaaauaaaauc

SEQ ID NO: 2307 - RNA, 38 nt, Artificial Sequence
  Description of Artificial Sequence:  Enzymatic Nucleic Acid
cauuuuugcugaugaggccguuaggccgaaaauaaaau

SEQ ID NO: 2308 - RNA, 38 nt, Artificial Sequence
  Description of Artificial Sequence:  Enzymatic Nucleic Acid
acauuuuucugaugaggccguuaggccgaaaaauaaaa

SEQ ID NO: 2309 - RNA, 38 nt, Artificial Sequence
  Description of Artificial Sequence:  Enzymatic Nucleic Acid
aaaauggccugaugaggccguuaggccgaaacauuuuu

SEQ ID NO: 2310 - RNA, 38 nt, Artificial Sequence
  Description of Artificial Sequence:  Enzymatic Nucleic Acid
ggaaucaacugaugaggccguuaggccgaaauggcaac

SEQ ID NO: 2311 - RNA, 38 nt, Artificial Sequence
  Description of Artificial Sequence:  Enzymatic Nucleic Acid
aggaaucacugaugaggccguuaggccgaaaauggcaa

SEQ ID NO: 2312 - RNA, 38 nt, Artificial Sequence
  Description of Artificial Sequence:  Enzymatic Nucleic Acid
caggaauccugaugaggccguuaggccgaaaaauggca

SEQ ID NO: 2313 - RNA, 38 nt, Artificial Sequence
  Description of Artificial Sequence:  Enzymatic Nucleic Acid
guuucaggcugaugaggccguuaggccgaaaucaaaau

SEQ ID NO: 2314 - RNA, 38 nt, Artificial Sequence
  Description of Artificial Sequence:  Enzymatic Nucleic Acid
uguuucagcugaugaggccguuaggccgaaaaucaaaa

SEQ ID NO: 2315 - RNA, 38 nt, Artificial Sequence
  Description of Artificial Sequence:  Enzymatic Nucleic Acid
gucucacacugaugaggccguuaggccgaaagucagcc

SEQ ID NO: 2316 - RNA, 38 nt, Artificial Sequence
  Description of Artificial Sequence:  Enzymatic Nucleic Acid
uaggucuccugaugaggccguuaggccgaaaguuuugg

SEQ ID NO: 2317 - RNA, 38 nt, Artificial Sequence
  Description of Artificial Sequence:  Enzymatic Nucleic Acid
cauuuuugcugaugaggccguuaggccgaaaggucuca

SEQ ID NO: 2318 - RNA, 38 nt, Artificial Sequence
  Description of Artificial Sequence:  Enzymatic Nucleic Acid
gcaaccagcugaugaggccguuaggccgaaacaucagc

SEQ ID NO: 2319 - RNA, 38 nt, Artificial Sequence
  Description of Artificial Sequence:  Enzymatic Nucleic Acid
agcaaccacugaugaggccguuaggccgaaaacaucag

SEQ ID NO: 2320 - RNA, 38 nt, Artificial Sequence
  Description of Artificial Sequence:  Enzymatic Nucleic Acid
gacucagccugaugaggccguuaggccgaaaccagaac

SEQ ID NO: 2321 - RNA, 38 nt, Artificial Sequence
  Description of Artificial Sequence:  Enzymatic Nucleic Acid
gaggaguacugaugaggccguuaggccgaaacucagca

SEQ ID NO: 2322 - RNA, 38 nt, Artificial Sequence
  Description of Artificial Sequence:  Enzymatic Nucleic Acid
uggaggagcugaugaggccguuaggccgaaagacucag

SEQ ID NO: 2323 - RNA, 38 nt, Artificial Sequence
  Description of Artificial Sequence:  Enzymatic Nucleic Acid
accuggagcugaugaggccguuaggccgaaaguagacu

SEQ ID NO: 2324 - RNA, 38 nt, Artificial Sequence
  Description of Artificial Sequence:  Enzymatic Nucleic Acid
auuaccugcugaugaggccguuaggccgaaaggaguag

SEQ ID NO: 2325 - RNA, 38 nt, Artificial Sequence
  Description of Artificial Sequence:  Enzymatic Nucleic Acid
uucaucaucugaugaggccguuaggccgaaaccuggag

SEQ ID NO: 2326 - RNA, 38 nt, Artificial Sequence
  Description of Artificial Sequence:  Enzymatic Nucleic Acid
gcucagugcugaugaggccguuaggccgaaaggguuca

SEQ ID NO: 2327 - RNA, 38 nt, Artificial Sequence
  Description of Artificial Sequence:  Enzymatic Nucleic Acid
gugaggugcugaugaggccguuaggccgaaauccuuuc

SEQ ID NO: 2328 - RNA, 38 nt, Artificial Sequence
  Description of Artificial Sequence:  Enzymatic Nucleic Acid
ucaggagucugaugaggccguuaggccgaaagguggau

SEQ ID NO: 2329 - RNA, 38 nt, Artificial Sequence
  Description of Artificial Sequence:  Enzymatic Nucleic Acid
gaaaucagcugaugaggccguuaggccgaaagugaggu

SEQ ID NO: 2330 - RNA, 38 nt, Artificial Sequence
  Description of Artificial Sequence:  Enzymatic Nucleic Acid
ugcaaugacugaugaggccguuaggccgaaaucaggag

SEQ ID NO: 2331 - RNA, 38 nt, Artificial Sequence
  Description of Artificial Sequence:  Enzymatic Nucleic Acid
cugcaaugcugaugaggccguuaggccgaaaaucagga

SEQ ID NO: 2332 - RNA, 38 nt, Artificial Sequence
  Description of Artificial Sequence:  Enzymatic Nucleic Acid
ccugcaaucugaugaggccguuaggccgaaaaaucagg

SEQ ID NO: 2333 - RNA, 38 nt, Artificial Sequence
  Description of Artificial Sequence:  Enzymatic Nucleic Acid
uuuccugccugaugaggccguuaggccgaaaugaaauc

SEQ ID NO: 2334 - RNA, 38 nt, Artificial Sequence
  Description of Artificial Sequence:  Enzymatic Nucleic Acid
auucagcucugaugaggccguuaggccgaaacuuuuuu

SEQ ID NO: 2335 - RNA, 38 nt, Artificial Sequence
  Description of Artificial Sequence:  Enzymatic Nucleic Acid
uauucagccugaugaggccguuaggccgaaaacuuuuu

SEQ ID NO: 2336 - RNA, 38 nt, Artificial Sequence
  Description of Artificial Sequence:  Enzymatic Nucleic Acid
gugguccacugaugaggccguuaggccgaaauucagcu

SEQ ID NO: 2337 - RNA, 38 nt, Artificial Sequence
  Description of Artificial Sequence:  Enzymatic Nucleic Acid
aaaugccucugaugaggccguuaggccgaaaccuugug

SEQ ID NO: 2338 - RNA, 38 nt, Artificial Sequence
  Description of Artificial Sequence:  Enzymatic Nucleic Acid
cauggacacugaugaggccguuaggccgaaaugccuua

SEQ ID NO: 2339 - RNA, 38 nt, Artificial Sequence
  Description of Artificial Sequence:  Enzymatic Nucleic Acid
ucauggaccugaugaggccguuaggccgaaaaugccuu

SEQ ID NO: 2340 - RNA, 38 nt, Artificial Sequence
  Description of Artificial Sequence:  Enzymatic Nucleic Acid
cacucaugcugaugaggccguuaggccgaaacaaaugc

SEQ ID NO: 2341 - RNA, 38 nt, Artificial Sequence
  Description of Artificial Sequence:  Enzymatic Nucleic Acid
ucguagaucugaugaggccguuaggccgaaagcccacu

SEQ ID NO: 2342 - RNA, 38 nt, Artificial Sequence
  Description of Artificial Sequence:  Enzymatic Nucleic Acid
ccaucguacugaugaggccguuaggccgaaaugagccc

SEQ ID NO: 2343 - RNA, 38 nt, Artificial Sequence
  Description of Artificial Sequence:  Enzymatic Nucleic Acid
ccccaucgcugaugaggccguuaggccgaaagaugagc

SEQ ID NO: 2344 - RNA, 38 nt, Artificial Sequence
  Description of Artificial Sequence:  Enzymatic Nucleic Acid
ucgucaaacugaugaggccguuaggccgaaacucccca

SEQ ID NO: 2345 - RNA, 38 nt, Artificial Sequence
  Description of Artificial Sequence:  Enzymatic Nucleic Acid
acucgucacugaugaggccguuaggccgaaauacuccc

SEQ ID NO: 2346 - RNA, 38 nt, Artificial Sequence
  Description of Artificial Sequence:  Enzymatic Nucleic Acid
uacucguccugaugaggccguuaggccgaaaauacucc

SEQ ID NO: 2347 - RNA, 38 nt, Artificial Sequence
  Description of Artificial Sequence:  Enzymatic Nucleic Acid
cauuauugcugaugaggccguuaggccgaaacucguca

SEQ ID NO: 2348 - RNA, 38 nt, Artificial Sequence
  Description of Artificial Sequence:  Enzymatic Nucleic Acid
cucaucaucugaugaggccguuaggccgaaauuguacu

SEQ ID NO: 2349 - RNA, 38 nt, Artificial Sequence
  Description of Artificial Sequence:  Enzymatic Nucleic Acid
auaaguagcugaugaggccguuaggccgaaauuucuca

SEQ ID NO: 2350 - RNA, 38 nt, Artificial Sequence
  Description of Artificial Sequence:  Enzymatic Nucleic Acid
gauaaguacugaugaggccguuaggccgaaaauuucuc

SEQ ID NO: 2351 - RNA, 38 nt, Artificial Sequence
  Description of Artificial Sequence:  Enzymatic Nucleic Acid
uggauaagcugaugaggccguuaggccgaaagaauuuc

SEQ ID NO: 2352 - RNA, 38 nt, Artificial Sequence
  Description of Artificial Sequence:  Enzymatic Nucleic Acid
cauuggaucugaugaggccguuaggccgaaaguagaau

SEQ ID NO: 2353 - RNA, 38 nt, Artificial Sequence
  Description of Artificial Sequence:  Enzymatic Nucleic Acid
ccauuggacugaugaggccguuaggccgaaaaguagaa

SEQ ID NO: 2354 - RNA, 38 nt, Artificial Sequence
  Description of Artificial Sequence:  Enzymatic Nucleic Acid
uuccauugcugaugaggccguuaggccgaaauaaguag

SEQ ID NO: 2355 - RNA, 38 nt, Artificial Sequence
  Description of Artificial Sequence:  Enzymatic Nucleic Acid
acugcuugcugaugaggccguuaggccgaaauucuucc

SEQ ID NO: 2356 - RNA, 38 nt, Artificial Sequence
  Description of Artificial Sequence:  Enzymatic Nucleic Acid
gaacaucucugaugaggccguuaggccgaaacugcuug

SEQ ID NO: 2357 - RNA, 38 nt, Artificial Sequence
  Description of Artificial Sequence:  Enzymatic Nucleic Acid
accugcugcugaugaggccguuaggccgaaacaucuua

SEQ ID NO: 2358 - RNA, 38 nt, Artificial Sequence
  Description of Artificial Sequence:  Enzymatic Nucleic Acid
uaccugcucugaugaggccguuaggccgaaaacaucuu

SEQ ID NO: 2359 - RNA, 38 nt, Artificial Sequence
  Description of Artificial Sequence:  Enzymatic Nucleic Acid
accaguaacugaugaggccguuaggccgaaaccugcug

SEQ ID NO: 2360 - RNA, 38 nt, Artificial Sequence
  Description of Artificial Sequence:  Enzymatic Nucleic Acid
guaccagucugaugaggccguuaggccgaaauaccugc

SEQ ID NO: 2361 - RNA, 38 nt, Artificial Sequence
  Description of Artificial Sequence:  Enzymatic Nucleic Acid
uguaccagcugaugaggccguuaggccgaaaauaccug

SEQ ID NO: 2362 - RNA, 38 nt, Artificial Sequence
  Description of Artificial Sequence:  Enzymatic Nucleic Acid
uacauuugcugaugaggccguuaggccgaaaccaguaa

SEQ ID NO: 2363 - RNA, 38 nt, Artificial Sequence
  Description of Artificial Sequence:  Enzymatic Nucleic Acid
uucuuuaccugaugaggccguuaggccgaaacauuugu

SEQ ID NO: 2364 - RNA, 38 nt, Artificial Sequence
  Description of Artificial Sequence:  Enzymatic Nucleic Acid
cacuucuucugaugaggccguuaggccgaaacuacauu

SEQ ID NO: 2365 - RNA, 38 nt, Artificial Sequence
  Description of Artificial Sequence:  Enzymatic Nucleic Acid
gccucccucugaugaggccguuaggccgaaacacuucu

SEQ ID NO: 2366 - RNA, 38 nt, Artificial Sequence
  Description of Artificial Sequence:  Enzymatic Nucleic Acid
uuuggugucugaugaggccguuaggccgaaacagcugc

SEQ ID NO: 2367 - RNA, 38 nt, Artificial Sequence
  Description of Artificial Sequence:  Enzymatic Nucleic Acid
uuuuggugcugaugaggccguuaggccgaaaacagcug

SEQ ID NO: 2368 - RNA, 38 nt, Artificial Sequence
  Description of Artificial Sequence:  Enzymatic Nucleic Acid
cuuuauugcugaugaggccguuaggccgaaaugugcau

SEQ ID NO: 2369 - RNA, 38 nt, Artificial Sequence
  Description of Artificial Sequence:  Enzymatic Nucleic Acid
acuuuauucugaugaggccguuaggccgaaaaugugca

SEQ ID NO: 2370 - RNA, 38 nt, Artificial Sequence
  Description of Artificial Sequence:  Enzymatic Nucleic Acid
uguaacuucugaugaggccguuaggccgaaauugaaug

SEQ ID NO: 2371 - RNA, 38 nt, Artificial Sequence
  Description of Artificial Sequence:  Enzymatic Nucleic Acid
aguccugucugaugaggccguuaggccgaaacuuuauu

SEQ ID NO: 2372 - RNA, 38 nt, Artificial Sequence
  Description of Artificial Sequence:  Enzymatic Nucleic Acid
gaguccugcugaugaggccguuaggccgaaaacuuuau

SEQ ID NO: 2373 - RNA, 38 nt, Artificial Sequence
  Description of Artificial Sequence:  Enzymatic Nucleic Acid
uuuucauacugaugaggccguuaggccgaaaguccugu

SEQ ID NO: 2374 - RNA, 38 nt, Artificial Sequence
  Description of Artificial Sequence:  Enzymatic Nucleic Acid
cuuuuucacugaugaggccguuaggccgaaagaguccu

SEQ ID NO: 2375 - RNA, 38 nt, Artificial Sequence
  Description of Artificial Sequence:  Enzymatic Nucleic Acid
ggagaacacugaugaggccguuaggccgaaacucacau

SEQ ID NO: 2376 - RNA, 38 nt, Artificial Sequence
  Description of Artificial Sequence:  Enzymatic Nucleic Acid
uggagaaccugaugaggccguuaggccgaaaacucaca

SEQ ID NO: 2377 - RNA, 38 nt, Artificial Sequence
  Description of Artificial Sequence:  Enzymatic Nucleic Acid
gauuggagcugaugaggccguuaggccgaaacaaacuc

SEQ ID NO: 2378 - RNA, 38 nt, Artificial Sequence
  Description of Artificial Sequence:  Enzymatic Nucleic Acid
ggauuggacugaugaggccguuaggccgaaaacaaacu

SEQ ID NO: 2379 - RNA, 38 nt, Artificial Sequence
  Description of Artificial Sequence:  Enzymatic Nucleic Acid
cgggauugcugaugaggccguuaggccgaaagaacaaa

SEQ ID NO: 2380 - RNA, 38 nt, Artificial Sequence
  Description of Artificial Sequence:  Enzymatic Nucleic Acid
ucuggcggcugaugaggccguuaggccgaaauuggaga

SEQ ID NO: 2381 - RNA, 38 nt, Artificial Sequence
  Description of Artificial Sequence:  Enzymatic Nucleic Acid
cauuauagcugaugaggccguuaggccgaaagccuucu

SEQ ID NO: 2382 - RNA, 38 nt, Artificial Sequence
  Description of Artificial Sequence:  Enzymatic Nucleic Acid
acauuauacugaugaggccguuaggccgaaaagccuuc

SEQ ID NO: 2383 - RNA, 38 nt, Artificial Sequence
  Description of Artificial Sequence:  Enzymatic Nucleic Acid
aaacauuacugaugaggccguuaggccgaaagaagccu

SEQ ID NO: 2384 - RNA, 38 nt, Artificial Sequence
  Description of Artificial Sequence:  Enzymatic Nucleic Acid
gcaaacaucugaugaggccguuaggccgaaauagaagc

SEQ ID NO: 2385 - RNA, 38 nt, Artificial Sequence
  Description of Artificial Sequence:  Enzymatic Nucleic Acid
guugugcacugaugaggccguuaggccgaaacauuaua

SEQ ID NO: 2386 - RNA, 38 nt, Artificial Sequence
  Description of Artificial Sequence:  Enzymatic Nucleic Acid
uguugugccugaugaggccguuaggccgaaaacauuau

SEQ ID NO: 2387 - RNA, 38 nt, Artificial Sequence
  Description of Artificial Sequence:  Enzymatic Nucleic Acid
auagaauccugaugaggccguuaggccgaaacauguug

SEQ ID NO: 2388 - RNA, 38 nt, Artificial Sequence
  Description of Artificial Sequence:  Enzymatic Nucleic Acid
aacuauagcugaugaggccguuaggccgaaaucaacau

SEQ ID NO: 2389 - RNA, 38 nt, Artificial Sequence
  Description of Artificial Sequence:  Enzymatic Nucleic Acid
caacuauacugaugaggccguuaggccgaaaaucaaca

SEQ ID NO: 2390 - RNA, 38 nt, Artificial Sequence
  Description of Artificial Sequence:  Enzymatic Nucleic Acid
uucaacuacugaugaggccguuaggccgaaagaaucaa

SEQ ID NO: 2391 - RNA, 38 nt, Artificial Sequence
  Description of Artificial Sequence:  Enzymatic Nucleic Acid
aauucaaccugaugaggccguuaggccgaaauagaauc

SEQ ID NO: 2392 - RNA, 38 nt, Artificial Sequence
  Description of Artificial Sequence:  Enzymatic Nucleic Acid
cagaauuccugaugaggccguuaggccgaaacuauaga

SEQ ID NO: 2393 - RNA, 38 nt, Artificial Sequence
  Description of Artificial Sequence:  Enzymatic Nucleic Acid
cuguacagcugaugaggccguuaggccgaaauucaacu

SEQ ID NO: 2394 - RNA, 38 nt, Artificial Sequence
  Description of Artificial Sequence:  Enzymatic Nucleic Acid
ucuguacacugaugaggccguuaggccgaaaauucaac

SEQ ID NO: 2395 - RNA, 38 nt, Artificial Sequence
  Description of Artificial Sequence:  Enzymatic Nucleic Acid
uuguucugcugaugaggccguuaggccgaaacagaauu

SEQ ID NO: 2396 - RNA, 38 nt, Artificial Sequence
  Description of Artificial Sequence:  Enzymatic Nucleic Acid
cuuguuugcugaugaggccguuaggccgaaagcuucuu

SEQ ID NO: 2397 - RNA, 38 nt, Artificial Sequence
  Description of Artificial Sequence:  Enzymatic Nucleic Acid
gcauuuuucugaugaggccguuaggccgaaauuuugcu

SEQ ID NO: 2398 - RNA, 38 nt, Artificial Sequence
  Description of Artificial Sequence:  Enzymatic Nucleic Acid
gcuucggacugaugaggccguuaggccgaaauugcauu

SEQ ID NO: 2399 - RNA, 38 nt, Artificial Sequence
  Description of Artificial Sequence:  Enzymatic Nucleic Acid
gugcuucgcugaugaggccguuaggccgaaagauugca

SEQ ID NO: 2400 - RNA, 38 nt, Artificial Sequence
  Description of Artificial Sequence:  Enzymatic Nucleic Acid
gaaucacgcugaugaggccguuaggccgaaaucacuuc

SEQ ID NO: 2401 - RNA, 38 nt, Artificial Sequence
  Description of Artificial Sequence:  Enzymatic Nucleic Acid
guccucagcugaugaggccguuaggccgaaaucacgga

SEQ ID NO: 2402 - RNA, 38 nt, Artificial Sequence
  Description of Artificial Sequence:  Enzymatic Nucleic Acid
aguccucacugaugaggccguuaggccgaaaaucacgg

SEQ ID NO: 2403 - RNA, 38 nt, Artificial Sequence
  Description of Artificial Sequence:  Enzymatic Nucleic Acid
uuuucuuacugaugaggccguuaggccgaaaguccuca

SEQ ID NO: 2404 - RNA, 38 nt, Artificial Sequence
  Description of Artificial Sequence:  Enzymatic Nucleic Acid
guuuucuucugaugaggccguuaggccgaaaaguccuc

SEQ ID NO: 2405 - RNA, 38 nt, Artificial Sequence
  Description of Artificial Sequence:  Enzymatic Nucleic Acid
gguuuucucugaugaggccguuaggccgaaaaaguccu

SEQ ID NO: 2406 - RNA, 38 nt, Artificial Sequence
  Description of Artificial Sequence:  Enzymatic Nucleic Acid
ugucauagcugaugaggccguuaggccgaaagugguuu

SEQ ID NO: 2407 - RNA, 38 nt, Artificial Sequence
  Description of Artificial Sequence:  Enzymatic Nucleic Acid
uguugucacugaugaggccguuaggccgaaaggagugg

SEQ ID NO: 2408 - RNA, 38 nt, Artificial Sequence
  Description of Artificial Sequence:  Enzymatic Nucleic Acid
gaagguggcugaugaggccguuaggccgaaauuuggug

SEQ ID NO: 2409 - RNA, 38 nt, Artificial Sequence
  Description of Artificial Sequence:  Enzymatic Nucleic Acid
gcaaugagcugaugaggccguuaggccgaaagguggga

SEQ ID NO: 2410 - RNA, 38 nt, Artificial Sequence
  Description of Artificial Sequence:  Enzymatic Nucleic Acid
agcaaugacugaugaggccguuaggccgaaaagguggg

SEQ ID NO: 2411 - RNA, 38 nt, Artificial Sequence
  Description of Artificial Sequence:  Enzymatic Nucleic Acid
gcagcaaucugaugaggccguuaggccgaaagaaggug

SEQ ID NO: 2412 - RNA, 38 nt, Artificial Sequence
  Description of Artificial Sequence:  Enzymatic Nucleic Acid
ucugcagccugaugaggccguuaggccgaaaugagaag

SEQ ID NO: 2413 - RNA, 38 nt, Artificial Sequence
  Description of Artificial Sequence:  Enzymatic Nucleic Acid
cuuugucccugaugaggccguuaggccgaaaucugcag

SEQ ID NO: 2414 - RNA, 38 nt, Artificial Sequence
  Description of Artificial Sequence:  Enzymatic Nucleic Acid
aaacacaccugaugaggccguuaggccgaaauucuuug

SEQ ID NO: 2415 - RNA, 38 nt, Artificial Sequence
  Description of Artificial Sequence:  Enzymatic Nucleic Acid
aaggacuacugaugaggccguuaggccgaaacacacaa

SEQ ID NO: 2416 - RNA, 38 nt, Artificial Sequence
  Description of Artificial Sequence:  Enzymatic Nucleic Acid
caaggacucugaugaggccguuaggccgaaaacacaca

SEQ ID NO: 2417 - RNA, 38 nt, Artificial Sequence
  Description of Artificial Sequence:  Enzymatic Nucleic Acid
ucaaggaccugaugaggccguuaggccgaaaaacacac

SEQ ID NO: 2418 - RNA, 38 nt, Artificial Sequence
  Description of Artificial Sequence:  Enzymatic Nucleic Acid
uugucaagcugaugaggccguuaggccgaaacuaaaca

SEQ ID NO: 2419 - RNA, 38 nt, Artificial Sequence
  Description of Artificial Sequence:  Enzymatic Nucleic Acid
gauuuguccugaugaggccguuaggccgaaaggacuaa

SEQ ID NO: 2420 - RNA, 38 nt, Artificial Sequence
  Description of Artificial Sequence:  Enzymatic Nucleic Acid
ugcuuccacugaugaggccguuaggccgaaauuuguca

SEQ ID NO: 2421 - RNA, 38 nt, Artificial Sequence
  Description of Artificial Sequence:  Enzymatic Nucleic Acid
gaggcggucugaugaggccguuaggccgaaaccagucg

SEQ ID NO: 2422 - RNA, 38 nt, Artificial Sequence
  Description of Artificial Sequence:  Enzymatic Nucleic Acid
agucgauucugaugaggccguuaggccgaaaggcgguu

SEQ ID NO: 2423 - RNA, 38 nt, Artificial Sequence
  Description of Artificial Sequence:  Enzymatic Nucleic Acid
auucaguccugaugaggccguuaggccgaaauugaggc

SEQ ID NO: 2424 - RNA, 38 nt, Artificial Sequence
  Description of Artificial Sequence:  Enzymatic Nucleic Acid
gccugcuucugaugaggccguuaggccgaaauucaguc

SEQ ID NO: 2425 - RNA, 38 nt, Artificial Sequence
  Description of Artificial Sequence:  Enzymatic Nucleic Acid
agcaggaacugaugaggccguuaggccgaaagcuggcc

SEQ ID NO: 2426 - RNA, 38 nt, Artificial Sequence
  Description of Artificial Sequence:  Enzymatic Nucleic Acid
cagcaggacugaugaggccguuaggccgaaaagcuggc

SEQ ID NO: 2427 - RNA, 38 nt, Artificial Sequence
  Description of Artificial Sequence:  Enzymatic Nucleic Acid
gcagcaggcugaugaggccguuaggccgaaaaagcugg

SEQ ID NO: 2428 - RNA, 38 nt, Artificial Sequence
  Description of Artificial Sequence:  Enzymatic Nucleic Acid
ugcagcagcugaugaggccguuaggccgaaaaaagcug

SEQ ID NO: 2429 - RNA, 38 nt, Artificial Sequence
  Description of Artificial Sequence:  Enzymatic Nucleic Acid
cccagcuccugaugaggccguuaggccgaaacugucug

SEQ ID NO: 2430 - RNA, 38 nt, Artificial Sequence
  Description of Artificial Sequence:  Enzymatic Nucleic Acid
caacccagcugaugaggccguuaggccgaaaccccagc

SEQ ID NO: 2431 - RNA, 38 nt, Artificial Sequence
  Description of Artificial Sequence:  Enzymatic Nucleic Acid
accauccccugaugaggccguuaggccgaaacccagga

SEQ ID NO: 2432 - RNA, 38 nt, Artificial Sequence
  Description of Artificial Sequence:  Enzymatic Nucleic Acid
cacugucacugaugaggccguuaggccgaaaugucacc

SEQ ID NO: 2433 - RNA, 38 nt, Artificial Sequence
  Description of Artificial Sequence:  Enzymatic Nucleic Acid
gcacuguccugaugaggccguuaggccgaaaaugucac

SEQ ID NO: 2434 - RNA, 38 nt, Artificial Sequence
  Description of Artificial Sequence:  Enzymatic Nucleic Acid
ucacuuugcugaugaggccguuaggccgaaacaugggc

SEQ ID NO: 2435 - RNA, 38 nt, Artificial Sequence
  Description of Artificial Sequence:  Enzymatic Nucleic Acid
aucuguaucugaugaggccguuaggccgaaaguucacu

SEQ ID NO: 2436 - RNA, 38 nt, Artificial Sequence
  Description of Artificial Sequence:  Enzymatic Nucleic Acid
uuuaucugcugaugaggccguuaggccgaaaugaguuc

SEQ ID NO: 2437 - RNA, 38 nt, Artificial Sequence
  Description of Artificial Sequence:  Enzymatic Nucleic Acid
ccacuguucugaugaggccguuaggccgaaaucuguau

SEQ ID NO: 2438 - RNA, 38 nt, Artificial Sequence
  Description of Artificial Sequence:  Enzymatic Nucleic Acid
cuuuuggccugaugaggccguuaggccgaaaguguguc

SEQ ID NO: 2439 - RNA, 38 nt, Artificial Sequence
  Description of Artificial Sequence:  Enzymatic Nucleic Acid
cugcaggucugaugaggccguuaggccgaaaucuuuug

SEQ ID NO: 2440 - RNA, 38 nt, Artificial Sequence
  Description of Artificial Sequence:  Enzymatic Nucleic Acid
gcugcaggcugaugaggccguuaggccgaaaaucuuuu

SEQ ID NO: 2441 - RNA, 38 nt, Artificial Sequence
  Description of Artificial Sequence:  Enzymatic Nucleic Acid
cccuccugcugaugaggccguuaggccgaaagcugcug

SEQ ID NO: 2442 - RNA, 38 nt, Artificial Sequence
  Description of Artificial Sequence:  Enzymatic Nucleic Acid
ucccuccucugaugaggccguuaggccgaaaagcugcu

SEQ ID NO: 2443 - RNA, 38 nt, Artificial Sequence
  Description of Artificial Sequence:  Enzymatic Nucleic Acid
ugcagaugcugaugaggccguuaggccgaaacgucccu

SEQ ID NO: 2444 - RNA, 38 nt, Artificial Sequence
  Description of Artificial Sequence:  Enzymatic Nucleic Acid
ccgcugcacugaugaggccguuaggccgaaauggacgu

SEQ ID NO: 2445 - RNA, 38 nt, Artificial Sequence
  Description of Artificial Sequence:  Enzymatic Nucleic Acid
gccgaucgcugaugaggccguuaggccgaaagcccgcu

SEQ ID NO: 2446 - RNA, 38 nt, Artificial Sequence
  Description of Artificial Sequence:  Enzymatic Nucleic Acid
ugccgauccugaugaggccguuaggccgaaaagcccgc

SEQ ID NO: 2447 - RNA, 38 nt, Artificial Sequence
  Description of Artificial Sequence:  Enzymatic Nucleic Acid
uaaaugcccugaugaggccguuaggccgaaaucgaagc

SEQ ID NO: 2448 - RNA, 38 nt, Artificial Sequence
  Description of Artificial Sequence:  Enzymatic Nucleic Acid
ucacaguacugaugaggccguuaggccgaaaugccgau

SEQ ID NO: 2449 - RNA, 38 nt, Artificial Sequence
  Description of Artificial Sequence:  Enzymatic Nucleic Acid
aucacagucugaugaggccguuaggccgaaaaugccga

SEQ ID NO: 2450 - RNA, 38 nt, Artificial Sequence
  Description of Artificial Sequence:  Enzymatic Nucleic Acid
aaucacagcugaugaggccguuaggccgaaaaaugccg

SEQ ID NO: 2451 - RNA, 38 nt, Artificial Sequence
  Description of Artificial Sequence:  Enzymatic Nucleic Acid
uucuuccucugaugaggccguuaggccgaaaucacagu

SEQ ID NO: 2452 - RNA, 38 nt, Artificial Sequence
  Description of Artificial Sequence:  Enzymatic Nucleic Acid
uuucuucccugaugaggccguuaggccgaaaaucacag

SEQ ID NO: 2453 - RNA, 38 nt, Artificial Sequence
  Description of Artificial Sequence:  Enzymatic Nucleic Acid
caguuggacugaugaggccguuaggccgaaauuucuuc

SEQ ID NO: 2454 - RNA, 38 nt, Artificial Sequence
  Description of Artificial Sequence:  Enzymatic Nucleic Acid
aucaguugcugaugaggccguuaggccgaaauauuucu

SEQ ID NO: 2455 - RNA, 38 nt, Artificial Sequence
  Description of Artificial Sequence:  Enzymatic Nucleic Acid
caauuucacugaugaggccguuaggccgaaauccauca

SEQ ID NO: 2456 - RNA, 38 nt, Artificial Sequence
  Description of Artificial Sequence:  Enzymatic Nucleic Acid
agcagcaccugaugaggccguuaggccgaaauuucaga

SEQ ID NO: 2457 - RNA, 38 nt, Artificial Sequence
  Description of Artificial Sequence:  Enzymatic Nucleic Acid
cccacuuacugaugaggccguuaggccgaaaguguugu

SEQ ID NO: 2458 - RNA, 38 nt, Artificial Sequence
  Description of Artificial Sequence:  Enzymatic Nucleic Acid
cacccacucugaugaggccguuaggccgaaauaguguu

SEQ ID NO: 2459 - RNA, 38 nt, Artificial Sequence
  Description of Artificial Sequence:  Enzymatic Nucleic Acid
ccucguuacugaugaggccguuaggccgaaagcaccca

SEQ ID NO: 2460 - RNA, 38 nt, Artificial Sequence
  Description of Artificial Sequence:  Enzymatic Nucleic Acid
accucguucugaugaggccguuaggccgaaaagcaccc

SEQ ID NO: 2461 - RNA, 38 nt, Artificial Sequence
  Description of Artificial Sequence:  Enzymatic Nucleic Acid
gaccucgucugaugaggccguuaggccgaaaaagcacc

SEQ ID NO: 2462 - RNA, 38 nt, Artificial Sequence
  Description of Artificial Sequence:  Enzymatic Nucleic Acid
cuuuguuucugaugaggccguuaggccgaaaccucguu

SEQ ID NO: 2463 - RNA, 38 nt, Artificial Sequence
  Description of Artificial Sequence:  Enzymatic Nucleic Acid
guguggaucugaugaggccguuaggccgaaauggcacc

SEQ ID NO: 2464 - RNA, 38 nt, Artificial Sequence
  Description of Artificial Sequence:  Enzymatic Nucleic Acid
acugugugcugaugaggccguuaggccgaaaugauggc

SEQ ID NO: 2465 - RNA, 38 nt, Artificial Sequence
  Description of Artificial Sequence:  Enzymatic Nucleic Acid
cccaaagccugaugaggccguuaggccgaaacugugug

SEQ ID NO: 2466 - RNA, 38 nt, Artificial Sequence
  Description of Artificial Sequence:  Enzymatic Nucleic Acid
gggccccacugaugaggccguuaggccgaaagcgacug

SEQ ID NO: 2467 - RNA, 38 nt, Artificial Sequence
  Description of Artificial Sequence:  Enzymatic Nucleic Acid
agggcccccugaugaggccguuaggccgaaaagcgacu

SEQ ID NO: 2468 - RNA, 38 nt, Artificial Sequence
  Description of Artificial Sequence:  Enzymatic Nucleic Acid
gagcugcacugaugaggccguuaggccgaaagggcccc

SEQ ID NO: 2469 - RNA, 38 nt, Artificial Sequence
  Description of Artificial Sequence:  Enzymatic Nucleic Acid
uaguucuucugaugaggccguuaggccgaaagcugcag

SEQ ID NO: 2470 - RNA, 38 nt, Artificial Sequence
  Description of Artificial Sequence:  Enzymatic Nucleic Acid
agcuccuccugaugaggccguuaggccgaaaguucuug

SEQ ID NO: 2471 - RNA, 38 nt, Artificial Sequence
  Description of Artificial Sequence:  Enzymatic Nucleic Acid
ucauuuugcugaugaggccguuaggccgaaacagcucc

SEQ ID NO: 2472 - RNA, 38 nt, Artificial Sequence
  Description of Artificial Sequence:  Enzymatic Nucleic Acid
ugucuguacugaugaggccguuaggccgaaaccuccug

SEQ ID NO: 2473 - RNA, 38 nt, Artificial Sequence
  Description of Artificial Sequence:  Enzymatic Nucleic Acid
augucugucugaugaggccguuaggccgaaaaccuccu

SEQ ID NO: 2474 - RNA, 38 nt, Artificial Sequence
  Description of Artificial Sequence:  Enzymatic Nucleic Acid
uaugucugcugaugaggccguuaggccgaaaaaccucc

SEQ ID NO: 2475 - RNA, 38 nt, Artificial Sequence
  Description of Artificial Sequence:  Enzymatic Nucleic Acid
cugaagcacugaugaggccguuaggccgaaaugucugu

SEQ ID NO: 2476 - RNA, 38 nt, Artificial Sequence
  Description of Artificial Sequence:  Enzymatic Nucleic Acid
uugaucugcugaugaggccguuaggccgaaagcauaug

SEQ ID NO: 2477 - RNA, 38 nt, Artificial Sequence
  Description of Artificial Sequence:  Enzymatic Nucleic Acid
cuugaucucugaugaggccguuaggccgaaaagcauau

SEQ ID NO: 2478 - RNA, 38 nt, Artificial Sequence
  Description of Artificial Sequence:  Enzymatic Nucleic Acid
cugaacuucugaugaggccguuaggccgaaaucugaag

SEQ ID NO: 2479 - RNA, 38 nt, Artificial Sequence
  Description of Artificial Sequence:  Enzymatic Nucleic Acid
uuguucugcugaugaggccguuaggccgaaacuugauc

SEQ ID NO: 2480 - RNA, 38 nt, Artificial Sequence
  Description of Artificial Sequence:  Enzymatic Nucleic Acid
auuguucucugaugaggccguuaggccgaaaacuugau

SEQ ID NO: 2481 - RNA, 38 nt, Artificial Sequence
  Description of Artificial Sequence:  Enzymatic Nucleic Acid
gcaucaaucugaugaggccguuaggccgaaaggccauu

SEQ ID NO: 2482 - RNA, 38 nt, Artificial Sequence
  Description of Artificial Sequence:  Enzymatic Nucleic Acid
aaagcauccugaugaggccguuaggccgaaaugaggcc

SEQ ID NO: 2483 - RNA, 38 nt, Artificial Sequence
  Description of Artificial Sequence:  Enzymatic Nucleic Acid
ggccccaacugaugaggccguuaggccgaaagcaucaa

SEQ ID NO: 2484 - RNA, 38 nt, Artificial Sequence
  Description of Artificial Sequence:  Enzymatic Nucleic Acid
gggccccacugaugaggccguuaggccgaaaagcauca

SEQ ID NO: 2485 - RNA, 38 nt, Artificial Sequence
  Description of Artificial Sequence:  Enzymatic Nucleic Acid
agggcccccugaugaggccguuaggccgaaaaagcauc

SEQ ID NO: 2486 - RNA, 38 nt, Artificial Sequence
  Description of Artificial Sequence:  Enzymatic Nucleic Acid
ccugaugacugaugaggccguuaggccgaaagggcccc

SEQ ID NO: 2487 - RNA, 38 nt, Artificial Sequence
  Description of Artificial Sequence:  Enzymatic Nucleic Acid
uccugaugcugaugaggccguuaggccgaaaagggccc

SEQ ID NO: 2488 - RNA, 38 nt, Artificial Sequence
  Description of Artificial Sequence:  Enzymatic Nucleic Acid
uuccugaucugaugaggccguuaggccgaaaaagggcc

SEQ ID NO: 2489 - RNA, 38 nt, Artificial Sequence
  Description of Artificial Sequence:  Enzymatic Nucleic Acid
cauuuccucugaugaggccguuaggccgaaaugaaagg

SEQ ID NO: 2490 - RNA, 38 nt, Artificial Sequence
  Description of Artificial Sequence:  Enzymatic Nucleic Acid
cgcugagacugaugaggccguuaggccgaaacagcucc

SEQ ID NO: 2491 - RNA, 38 nt, Artificial Sequence
  Description of Artificial Sequence:  Enzymatic Nucleic Acid
agcgcugacugaugaggccguuaggccgaaagacagcu

SEQ ID NO: 2492 - RNA, 38 nt, Artificial Sequence
  Description of Artificial Sequence:  Enzymatic Nucleic Acid
ggagcgcucugaugaggccguuaggccgaaagagacag

SEQ ID NO: 2493 - RNA, 38 nt, Artificial Sequence
  Description of Artificial Sequence:  Enzymatic Nucleic Acid
gcuggaugcugaugaggccguuaggccgaaagcgcuga

SEQ ID NO: 2494 - RNA, 38 nt, Artificial Sequence
  Description of Artificial Sequence:  Enzymatic Nucleic Acid
ucaagcugcugaugaggccguuaggccgaaauggagcg

SEQ ID NO: 2495 - RNA, 38 nt, Artificial Sequence
  Description of Artificial Sequence:  Enzymatic Nucleic Acid
uuacucuccugaugaggccguuaggccgaaagcuggau

SEQ ID NO: 2496 - RNA, 38 nt, Artificial Sequence
  Description of Artificial Sequence:  Enzymatic Nucleic Acid
uaaucccucugaugaggccguuaggccgaaacucucaa

SEQ ID NO: 2497 - RNA, 38 nt, Artificial Sequence
  Description of Artificial Sequence:  Enzymatic Nucleic Acid
ggaggguucugaugaggccguuaggccgaaaucccuua

SEQ ID NO: 2498 - RNA, 38 nt, Artificial Sequence
  Description of Artificial Sequence:  Enzymatic Nucleic Acid
uggagggucugaugaggccguuaggccgaaaaucccuu

SEQ ID NO: 2499 - RNA, 38 nt, Artificial Sequence
  Description of Artificial Sequence:  Enzymatic Nucleic Acid
cuguucugcugaugaggccguuaggccgaaaggguuaa

SEQ ID NO: 2500 - RNA, 38 nt, Artificial Sequence
  Description of Artificial Sequence:  Enzymatic Nucleic Acid
cuguccaccugaugaggccguuaggccgaaaucacugu

SEQ ID NO: 2501 - RNA, 38 nt, Artificial Sequence
  Description of Artificial Sequence:  Enzymatic Nucleic Acid
aagaaacacugaugaggccguuaggccgaaaguguccu

SEQ ID NO: 2502 - RNA, 38 nt, Artificial Sequence
  Description of Artificial Sequence:  Enzymatic Nucleic Acid
uaagaaaccugaugaggccguuaggccgaaaagugucc

SEQ ID NO: 2503 - RNA, 38 nt, Artificial Sequence
  Description of Artificial Sequence:  Enzymatic Nucleic Acid
ugauaagacugaugaggccguuaggccgaaacaaagug

SEQ ID NO: 2504 - RNA, 38 nt, Artificial Sequence
  Description of Artificial Sequence:  Enzymatic Nucleic Acid
gugauaagcugaugaggccguuaggccgaaaacaaagu

SEQ ID NO: 2505 - RNA, 38 nt, Artificial Sequence
  Description of Artificial Sequence:  Enzymatic Nucleic Acid
ggugauaacugaugaggccguuaggccgaaaaacaaag

SEQ ID NO: 2506 - RNA, 38 nt, Artificial Sequence
  Description of Artificial Sequence:  Enzymatic Nucleic Acid
caggugaucugaugaggccguuaggccgaaagaaacaa

SEQ ID NO: 2507 - RNA, 38 nt, Artificial Sequence
  Description of Artificial Sequence:  Enzymatic Nucleic Acid
ccaggugacugaugaggccguuaggccgaaaagaaaca

SEQ ID NO: 2508 - RNA, 38 nt, Artificial Sequence
  Description of Artificial Sequence:  Enzymatic Nucleic Acid
guccaggucugaugaggccguuaggccgaaauaagaaa

SEQ ID NO: 2509 - RNA, 38 nt, Artificial Sequence
  Description of Artificial Sequence:  Enzymatic Nucleic Acid
gauuugggcugaugaggccguuaggccgaaaggcugcg

SEQ ID NO: 2510 - RNA, 38 nt, Artificial Sequence
  Description of Artificial Sequence:  Enzymatic Nucleic Acid
cagagaagcugaugaggccguuaggccgaaauuugggg

SEQ ID NO: 2511 - RNA, 38 nt, Artificial Sequence
  Description of Artificial Sequence:  Enzymatic Nucleic Acid
ucccagagcugaugaggccguuaggccgaaaggauuug

SEQ ID NO: 2512 - RNA, 38 nt, Artificial Sequence
  Description of Artificial Sequence:  Enzymatic Nucleic Acid
aucccagacugaugaggccguuaggccgaaaaggauuu

SEQ ID NO: 2513 - RNA, 38 nt, Artificial Sequence
  Description of Artificial Sequence:  Enzymatic Nucleic Acid
ggaucccacugaugaggccguuaggccgaaagaaggau

SEQ ID NO: 2514 - RNA, 38 nt, Artificial Sequence
  Description of Artificial Sequence:  Enzymatic Nucleic Acid
uccacuggcugaugaggccguuaggccgaaaucccaga

SEQ ID NO: 2515 - RNA, 38 nt, Artificial Sequence
  Description of Artificial Sequence:  Enzymatic Nucleic Acid
ccacuacacugaugaggccguuaggccgaaagccaccu

SEQ ID NO: 2516 - RNA, 38 nt, Artificial Sequence
  Description of Artificial Sequence:  Enzymatic Nucleic Acid
uccacuaccugaugaggccguuaggccgaaaagccacc

SEQ ID NO: 2517 - RNA, 38 nt, Artificial Sequence
  Description of Artificial Sequence:  Enzymatic Nucleic Acid
uuguccaccugaugaggccguuaggccgaaacaaagcc

SEQ ID NO: 2518 - RNA, 38 nt, Artificial Sequence
  Description of Artificial Sequence:  Enzymatic Nucleic Acid
uuuggaggcugaugaggccguuaggccgaaaggccauu

SEQ ID NO: 2519 - RNA, 38 nt, Artificial Sequence
  Description of Artificial Sequence:  Enzymatic Nucleic Acid
gggauuugcugaugaggccguuaggccgaaagguaggc

SEQ ID NO: 2520 - RNA, 38 nt, Artificial Sequence
  Description of Artificial Sequence:  Enzymatic Nucleic Acid
augccuggcugaugaggccguuaggccgaaauuuggag

SEQ ID NO: 2521 - RNA, 38 nt, Artificial Sequence
  Description of Artificial Sequence:  Enzymatic Nucleic Acid
accuuagccugaugaggccguuaggccgaaaugccugg

SEQ ID NO: 2522 - RNA, 38 nt, Artificial Sequence
  Description of Artificial Sequence:  Enzymatic Nucleic Acid
gccaaccucugaugaggccguuaggccgaaagcaaugc

SEQ ID NO: 2523 - RNA, 38 nt, Artificial Sequence
  Description of Artificial Sequence:  Enzymatic Nucleic Acid
caagugcccugaugaggccguuaggccgaaaccuuagc

SEQ ID NO: 2524 - RNA, 38 nt, Artificial Sequence
  Description of Artificial Sequence:  Enzymatic Nucleic Acid
guauuucccugaugaggccguuaggccgaaagugccaa

SEQ ID NO: 2525 - RNA, 38 nt, Artificial Sequence
  Description of Artificial Sequence:  Enzymatic Nucleic Acid
gcagacugcugaugaggccguuaggccgaaauuuccaa

SEQ ID NO: 2526 - RNA, 38 nt, Artificial Sequence
  Description of Artificial Sequence:  Enzymatic Nucleic Acid
ugcuugcacugaugaggccguuaggccgaaacuguauu

SEQ ID NO: 2527 - RNA, 38 nt, Artificial Sequence
  Description of Artificial Sequence:  Enzymatic Nucleic Acid
agguuugucugaugaggccguuaggccgaaagcuugcu

SEQ ID NO: 2528 - RNA, 38 nt, Artificial Sequence
  Description of Artificial Sequence:  Enzymatic Nucleic Acid
ucaggguccugaugaggccguuaggccgaaagguuugu

SEQ ID NO: 2529 - RNA, 38 nt, Artificial Sequence
  Description of Artificial Sequence:  Enzymatic Nucleic Acid
cgggacgucugaugaggccguuaggccgaaacagucag

SEQ ID NO: 2530 - RNA, 38 nt, Artificial Sequence
  Description of Artificial Sequence:  Enzymatic Nucleic Acid
acgcacggcugaugaggccguuaggccgaaacgugaca

SEQ ID NO: 2531 - RNA, 38 nt, Artificial Sequence
  Description of Artificial Sequence:  Enzymatic Nucleic Acid
uagcauugcugaugaggccguuaggccgaaacgcacgg

SEQ ID NO: 2532 - RNA, 38 nt, Artificial Sequence
  Description of Artificial Sequence:  Enzymatic Nucleic Acid
aggcagggcugaugaggccguuaggccgaaagcauugg

SEQ ID NO: 2533 - RNA, 38 nt, Artificial Sequence
  Description of Artificial Sequence:  Enzymatic Nucleic Acid
uguaauugcugaugaggccguuaggccgaaaggcaggg

SEQ ID NO: 2534 - RNA, 38 nt, Artificial Sequence
  Description of Artificial Sequence:  Enzymatic Nucleic Acid
gucacugucugaugaggccguuaggccgaaauuggagg

SEQ ID NO: 2535 - RNA, 38 nt, Artificial Sequence
  Description of Artificial Sequence:  Enzymatic Nucleic Acid
agucacugcugaugaggccguuaggccgaaaauuggag

SEQ ID NO: 2536 - RNA, 38 nt, Artificial Sequence
  Description of Artificial Sequence:  Enzymatic Nucleic Acid
cguuuuggcugaugaggccguuaggccgaaagucacug

SEQ ID NO: 2537 - RNA, 38 nt, Artificial Sequence
  Description of Artificial Sequence:  Enzymatic Nucleic Acid
ucguuuugcugaugaggccguuaggccgaaaagucacu

SEQ ID NO: 2538 - RNA, 38 nt, Artificial Sequence
  Description of Artificial Sequence:  Enzymatic Nucleic Acid
ggcuggggcugaugaggccguuaggccgaaauuugcug

SEQ ID NO: 2539 - RNA, 38 nt, Artificial Sequence
  Description of Artificial Sequence:  Enzymatic Nucleic Acid
gggcugggcugaugaggccguuaggccgaaaauuugcu

SEQ ID NO: 2540 - RNA, 38 nt, Artificial Sequence
  Description of Artificial Sequence:  Enzymatic Nucleic Acid
aacuaccacugaugaggccguuaggccgaaagggcugg

SEQ ID NO: 2541 - RNA, 38 nt, Artificial Sequence
  Description of Artificial Sequence:  Enzymatic Nucleic Acid
gcauaaaccugaugaggccguuaggccgaaaccagagg

SEQ ID NO: 2542 - RNA, 38 nt, Artificial Sequence
  Description of Artificial Sequence:  Enzymatic Nucleic Acid
uuugcauacugaugaggccguuaggccgaaacuaccag

SEQ ID NO: 2543 - RNA, 38 nt, Artificial Sequence
  Description of Artificial Sequence:  Enzymatic Nucleic Acid
auuugcaucugaugaggccguuaggccgaaaacuacca

SEQ ID NO: 2544 - RNA, 38 nt, Artificial Sequence
  Description of Artificial Sequence:  Enzymatic Nucleic Acid
uauuugcacugaugaggccguuaggccgaaaaacuacc

SEQ ID NO: 2545 - RNA, 38 nt, Artificial Sequence
  Description of Artificial Sequence:  Enzymatic Nucleic Acid
uuggcgaacugaugaggccguuaggccgaaauuugcau

SEQ ID NO: 2546 - RNA, 38 nt, Artificial Sequence
  Description of Artificial Sequence:  Enzymatic Nucleic Acid
ccuuggcgcugaugaggccguuaggccgaaauauuugc

SEQ ID NO: 2547 - RNA, 38 nt, Artificial Sequence
  Description of Artificial Sequence:  Enzymatic Nucleic Acid
uccuuggccugaugaggccguuaggccgaaaauauuug

SEQ ID NO: 2548 - RNA, 38 nt, Artificial Sequence
  Description of Artificial Sequence:  Enzymatic Nucleic Acid
gaauugggcugaugaggccguuaggccgaaaggcuccu

SEQ ID NO: 2549 - RNA, 38 nt, Artificial Sequence
  Description of Artificial Sequence:  Enzymatic Nucleic Acid
gcccugagcugaugaggccguuaggccgaaauugggga

SEQ ID NO: 2550 - RNA, 38 nt, Artificial Sequence
  Description of Artificial Sequence:  Enzymatic Nucleic Acid
ggcccugacugaugaggccguuaggccgaaaauugggg

SEQ ID NO: 2551 - RNA, 38 nt, Artificial Sequence
  Description of Artificial Sequence:  Enzymatic Nucleic Acid
cuggcccucugaugaggccguuaggccgaaagaauugg

SEQ ID NO: 2552 - RNA, 38 nt, Artificial Sequence
  Description of Artificial Sequence:  Enzymatic Nucleic Acid
agggcugucugaugaggccguuaggccgaaacacuggc

SEQ ID NO: 2553 - RNA, 38 nt, Artificial Sequence
  Description of Artificial Sequence:  Enzymatic Nucleic Acid
acugauuccugaugaggccguuaggccgaaaucagggc

SEQ ID NO: 2554 - RNA, 38 nt, Artificial Sequence
  Description of Artificial Sequence:  Enzymatic Nucleic Acid
cauucacucugaugaggccguuaggccgaaauucaauc

SEQ ID NO: 2555 - RNA, 38 nt, Artificial Sequence
  Description of Artificial Sequence:  Enzymatic Nucleic Acid
uccaaggucugaugaggccguuaggccgaaacuguuuu

SEQ ID NO: 2556 - RNA, 38 nt, Artificial Sequence
  Description of Artificial Sequence:  Enzymatic Nucleic Acid
uuccaaggcugaugaggccguuaggccgaaaacuguuu

SEQ ID NO: 2557 - RNA, 38 nt, Artificial Sequence
  Description of Artificial Sequence:  Enzymatic Nucleic Acid
guaguucccugaugaggccguuaggccgaaagguaacu

SEQ ID NO: 2558 - RNA, 38 nt, Artificial Sequence
  Description of Artificial Sequence:  Enzymatic Nucleic Acid
uuauccagcugaugaggccguuaggccgaaaguuccaa

SEQ ID NO: 2559 - RNA, 38 nt, Artificial Sequence
  Description of Artificial Sequence:  Enzymatic Nucleic Acid
ugcuccaucugaugaggccguuaggccgaaauccagua

SEQ ID NO: 2560 - RNA, 38 nt, Artificial Sequence
  Description of Artificial Sequence:  Enzymatic Nucleic Acid
auccuuagcugaugaggccguuaggccgaaagcaucag

SEQ ID NO: 2561 - RNA, 38 nt, Artificial Sequence
  Description of Artificial Sequence:  Enzymatic Nucleic Acid
gucauccucugaugaggccguuaggccgaaaguagcau

SEQ ID NO: 2562 - RNA, 38 nt, Artificial Sequence
  Description of Artificial Sequence:  Enzymatic Nucleic Acid
cuugaguacugaugaggccguuaggccgaaacaccguc

SEQ ID NO: 2563 - RNA, 38 nt, Artificial Sequence
  Description of Artificial Sequence:  Enzymatic Nucleic Acid
accuugagcugaugaggccguuaggccgaaagacaccg

SEQ ID NO: 2564 - RNA, 38 nt, Artificial Sequence
  Description of Artificial Sequence:  Enzymatic Nucleic Acid
aauaccuucugaugaggccguuaggccgaaaguagaca

SEQ ID NO: 2565 - RNA, 38 nt, Artificial Sequence
  Description of Artificial Sequence:  Enzymatic Nucleic Acid
uugugaaacugaugaggccguuaggccgaaaccuugag

SEQ ID NO: 2566 - RNA, 38 nt, Artificial Sequence
  Description of Artificial Sequence:  Enzymatic Nucleic Acid
aguugugacugaugaggccguuaggccgaaauaccuug

SEQ ID NO: 2567 - RNA, 38 nt, Artificial Sequence
  Description of Artificial Sequence:  Enzymatic Nucleic Acid
aaguugugcugaugaggccguuaggccgaaaauaccuu

SEQ ID NO: 2568 - RNA, 38 nt, Artificial Sequence
  Description of Artificial Sequence:  Enzymatic Nucleic Acid
uaaguugucugaugaggccguuaggccgaaaaauaccu

SEQ ID NO: 2569 - RNA, 38 nt, Artificial Sequence
  Description of Artificial Sequence:  Enzymatic Nucleic Acid
cgugucaucugaugaggccguuaggccgaaaguuguga

SEQ ID NO: 2570 - RNA, 38 nt, Artificial Sequence
  Description of Artificial Sequence:  Enzymatic Nucleic Acid
ucgugucacugaugaggccguuaggccgaaaaguugug

SEQ ID NO: 2571 - RNA, 38 nt, Artificial Sequence
  Description of Artificial Sequence:  Enzymatic Nucleic Acid
acuguauccugaugaggccguuaggccgaaaccauucg

SEQ ID NO: 2572 - RNA, 38 nt, Artificial Sequence
  Description of Artificial Sequence:  Enzymatic Nucleic Acid
uuacacugcugaugaggccguuaggccgaaaucuacca

SEQ ID NO: 2573 - RNA, 38 nt, Artificial Sequence
  Description of Artificial Sequence:  Enzymatic Nucleic Acid
cgcacuuucugaugaggccguuaggccgaaacacugua

SEQ ID NO: 2574 - RNA, 38 nt, Artificial Sequence
  Description of Artificial Sequence:  Enzymatic Nucleic Acid
uccucccacugaugaggccguuaggccgaaagcccgca

SEQ ID NO: 2575 - RNA, 38 nt, Artificial Sequence
  Description of Artificial Sequence:  Enzymatic Nucleic Acid
gcugcguucugaugaggccguuaggccgaaacuccucc

SEQ ID NO: 2576 - RNA, 38 nt, Artificial Sequence
  Description of Artificial Sequence:  Enzymatic Nucleic Acid
ggcugcgucugaugaggccguuaggccgaaaacuccuc

SEQ ID NO: 2577 - RNA, 38 nt, Artificial Sequence
  Description of Artificial Sequence:  Enzymatic Nucleic Acid
ugcuggggcugaugaggccguuaggccgaaaucacucu

SEQ ID NO: 2578 - RNA, 38 nt, Artificial Sequence
  Description of Artificial Sequence:  Enzymatic Nucleic Acid
cagguaugcugaugaggccguuaggccgaaacagugcu

SEQ ID NO: 2579 - RNA, 38 nt, Artificial Sequence
  Description of Artificial Sequence:  Enzymatic Nucleic Acid
cagccaggcugaugaggccguuaggccgaaauguacag

SEQ ID NO: 2580 - RNA, 38 nt, Artificial Sequence
  Description of Artificial Sequence:  Enzymatic Nucleic Acid
ucauucuccugaugaggccguuaggccgaaauccagcc

SEQ ID NO: 2581 - RNA, 38 nt, Artificial Sequence
  Description of Artificial Sequence:  Enzymatic Nucleic Acid
uuccauugcugaugaggccguuaggccgaaauuucauc

SEQ ID NO: 2582 - RNA, 38 nt, Artificial Sequence
  Description of Artificial Sequence:  Enzymatic Nucleic Acid
ucuuggugcugaugaggccguuaggccgaaauuccauu

SEQ ID NO: 2583 - RNA, 38 nt, Artificial Sequence
  Description of Artificial Sequence:  Enzymatic Nucleic Acid
uccuuauucugaugaggccguuaggccgaaauuucagg

SEQ ID NO: 2584 - RNA, 38 nt, Artificial Sequence
  Description of Artificial Sequence:  Enzymatic Nucleic Acid
auccuuaucugaugaggccguuaggccgaaaauuucag

SEQ ID NO: 2585 - RNA, 38 nt, Artificial Sequence
  Description of Artificial Sequence:  Enzymatic Nucleic Acid
aucauccucugaugaggccguuaggccgaaauuaauuu

SEQ ID NO: 2586 - RNA, 38 nt, Artificial Sequence
  Description of Artificial Sequence:  Enzymatic Nucleic Acid
uuguguugcugaugaggccguuaggccgaaacaucauc

SEQ ID NO: 2587 - RNA, 38 nt, Artificial Sequence
  Description of Artificial Sequence:  Enzymatic Nucleic Acid
cuuguguucugaugaggccguuaggccgaaaacaucau

SEQ ID NO: 2588 - RNA, 38 nt, Artificial Sequence
  Description of Artificial Sequence:  Enzymatic Nucleic Acid
ucugcugacugaugaggccguuaggccgaaacacacuu

SEQ ID NO: 2589 - RNA, 38 nt, Artificial Sequence
  Description of Artificial Sequence:  Enzymatic Nucleic Acid
uucugcugcugaugaggccguuaggccgaaaacacacu

SEQ ID NO: 2590 - RNA, 38 nt, Artificial Sequence
  Description of Artificial Sequence:  Enzymatic Nucleic Acid
guucugcucugaugaggccguuaggccgaaaaacacac

SEQ ID NO: 2591 - RNA, 38 nt, Artificial Sequence
  Description of Artificial Sequence:  Enzymatic Nucleic Acid
cucccgagcugaugaggccguuaggccgaaauguucug

SEQ ID NO: 2592 - RNA, 38 nt, Artificial Sequence
  Description of Artificial Sequence:  Enzymatic Nucleic Acid
agccuccccugaugaggccguuaggccgaaaggauguu

SEQ ID NO: 2593 - RNA, 38 nt, Artificial Sequence
  Description of Artificial Sequence:  Enzymatic Nucleic Acid
ccacaaaucugaugaggccguuaggccgaaagccuccc

SEQ ID NO: 2594 - RNA, 38 nt, Artificial Sequence
  Description of Artificial Sequence:  Enzymatic Nucleic Acid
aagccacacugaugaggccguuaggccgaaaugagccu

SEQ ID NO: 2595 - RNA, 38 nt, Artificial Sequence
  Description of Artificial Sequence:  Enzymatic Nucleic Acid
gaagccaccugaugaggccguuaggccgaaaaugagcc

SEQ ID NO: 2596 - RNA, 38 nt, Artificial Sequence
  Description of Artificial Sequence:  Enzymatic Nucleic Acid
gacaucagcugaugaggccguuaggccgaaagccacaa

SEQ ID NO: 2597 - RNA, 38 nt, Artificial Sequence
  Description of Artificial Sequence:  Enzymatic Nucleic Acid
ggacaucacugaugaggccguuaggccgaaaagccaca

SEQ ID NO: 2598 - RNA, 38 nt, Artificial Sequence
  Description of Artificial Sequence:  Enzymatic Nucleic Acid
gcauuuggcugaugaggccguuaggccgaaacaucaga

SEQ ID NO: 2599 - RNA, 38 nt, Artificial Sequence
  Description of Artificial Sequence:  Enzymatic Nucleic Acid
agguauggcugaugaggccguuaggccgaaagcauuug

SEQ ID NO: 2600 - RNA, 38 nt, Artificial Sequence
  Description of Artificial Sequence:  Enzymatic Nucleic Acid
agaucaggcugaugaggccguuaggccgaaaugggagc

SEQ ID NO: 2601 - RNA, 38 nt, Artificial Sequence
  Description of Artificial Sequence:  Enzymatic Nucleic Acid
ugggaagacugaugaggccguuaggccgaaaucaggua

SEQ ID NO: 2602 - RNA, 38 nt, Artificial Sequence
  Description of Artificial Sequence:  Enzymatic Nucleic Acid
ggugggaacugaugaggccguuaggccgaaagaucagg

SEQ ID NO: 2603 - RNA, 38 nt, Artificial Sequence
  Description of Artificial Sequence:  Enzymatic Nucleic Acid
caggugggcugaugaggccguuaggccgaaagagauca

SEQ ID NO: 2604 - RNA, 38 nt, Artificial Sequence
  Description of Artificial Sequence:  Enzymatic Nucleic Acid
ccagguggcugaugaggccguuaggccgaaaagagauc

SEQ ID NO: 2605 - RNA, 38 nt, Artificial Sequence
  Description of Artificial Sequence:  Enzymatic Nucleic Acid
aggucggucugaugaggccguuaggccgaaauuuggcc

SEQ ID NO: 2606 - RNA, 38 nt, Artificial Sequence
  Description of Artificial Sequence:  Enzymatic Nucleic Acid
cccccgugcugaugaggccguuaggccgaaauuuccgc

SEQ ID NO: 2607 - RNA, 38 nt, Artificial Sequence
  Description of Artificial Sequence:  Enzymatic Nucleic Acid
gcccccgucugaugaggccguuaggccgaaaauuuccg

SEQ ID NO: 2608 - RNA, 38 nt, Artificial Sequence
  Description of Artificial Sequence:  Enzymatic Nucleic Acid
auuaaugacugaugaggccguuaggccgaaacugcccc

SEQ ID NO: 2609 - RNA, 38 nt, Artificial Sequence
  Description of Artificial Sequence:  Enzymatic Nucleic Acid
agauuaaucugaugaggccguuaggccgaaagacugcc

SEQ ID NO: 2610 - RNA, 38 nt, Artificial Sequence
  Description of Artificial Sequence:  Enzymatic Nucleic Acid
gucagauucugaugaggccguuaggccgaaaugagacu

SEQ ID NO: 2611 - RNA, 38 nt, Artificial Sequence
  Description of Artificial Sequence:  Enzymatic Nucleic Acid
agucagaucugaugaggccguuaggccgaaaaugagac

SEQ ID NO: 2612 - RNA, 38 nt, Artificial Sequence
  Description of Artificial Sequence:  Enzymatic Nucleic Acid
ccaagucacugaugaggccguuaggccgaaauuaauga

SEQ ID NO: 2613 - RNA, 38 nt, Artificial Sequence
  Description of Artificial Sequence:  Enzymatic Nucleic Acid
agcugucccugaugaggccguuaggccgaaagucagau

SEQ ID NO: 2614 - RNA, 38 nt, Artificial Sequence
  Description of Artificial Sequence:  Enzymatic Nucleic Acid
auccccagcugaugaggccguuaggccgaaagcugucc

SEQ ID NO: 2615 - RNA, 38 nt, Artificial Sequence
  Description of Artificial Sequence:  Enzymatic Nucleic Acid
auggucaucugaugaggccguuaggccgaaaucauccc

SEQ ID NO: 2616 - RNA, 38 nt, Artificial Sequence
  Description of Artificial Sequence:  Enzymatic Nucleic Acid
cauggucacugaugaggccguuaggccgaaaaucaucc

SEQ ID NO: 2617 - RNA, 38 nt, Artificial Sequence
  Description of Artificial Sequence:  Enzymatic Nucleic Acid
auacuugucugaugaggccguuaggccgaaagcuguuc

SEQ ID NO: 2618 - RNA, 38 nt, Artificial Sequence
  Description of Artificial Sequence:  Enzymatic Nucleic Acid
gaaugauacugaugaggccguuaggccgaaacuuguga

SEQ ID NO: 2619 - RNA, 38 nt, Artificial Sequence
  Description of Artificial Sequence:  Enzymatic Nucleic Acid
ucgaaugacugaugaggccguuaggccgaaauacuugu

SEQ ID NO: 2620 - RNA, 38 nt, Artificial Sequence
  Description of Artificial Sequence:  Enzymatic Nucleic Acid
auucgaaucugaugaggccguuaggccgaaauauacuu

SEQ ID NO: 2621 - RNA, 38 nt, Artificial Sequence
  Description of Artificial Sequence:  Enzymatic Nucleic Acid
cuuauucgcugaugaggccguuaggccgaaaugauaua

SEQ ID NO: 2622 - RNA, 38 nt, Artificial Sequence
  Description of Artificial Sequence:  Enzymatic Nucleic Acid
acuuauuccugaugaggccguuaggccgaaaaugauau

SEQ ID NO: 2623 - RNA, 38 nt, Artificial Sequence
  Description of Artificial Sequence:  Enzymatic Nucleic Acid
cuuguacucugaugaggccguuaggccgaaauucgaau

SEQ ID NO: 2624 - RNA, 38 nt, Artificial Sequence
  Description of Artificial Sequence:  Enzymatic Nucleic Acid
aauacuugcugaugaggccguuaggccgaaacuuauuc

SEQ ID NO: 2625 - RNA, 38 nt, Artificial Sequence
  Description of Artificial Sequence:  Enzymatic Nucleic Acid
aucaagaacugaugaggccguuaggccgaaacuuguac

SEQ ID NO: 2626 - RNA, 38 nt, Artificial Sequence
  Description of Artificial Sequence:  Enzymatic Nucleic Acid
agaucaagcugaugaggccguuaggccgaaauacuugu

SEQ ID NO: 2627 - RNA, 38 nt, Artificial Sequence
  Description of Artificial Sequence:  Enzymatic Nucleic Acid
gagaucaacugaugaggccguuaggccgaaaauacuug

SEQ ID NO: 2628 - RNA, 38 nt, Artificial Sequence
  Description of Artificial Sequence:  Enzymatic Nucleic Acid
cugagauccugaugaggccguuaggccgaaagaauacu

SEQ ID NO: 2629 - RNA, 38 nt, Artificial Sequence
  Description of Artificial Sequence:  Enzymatic Nucleic Acid
gucucugacugaugaggccguuaggccgaaaucaagaa

SEQ ID NO: 2630 - RNA, 38 nt, Artificial Sequence
  Description of Artificial Sequence:  Enzymatic Nucleic Acid
uugucucucugaugaggccguuaggccgaaagaucaag

SEQ ID NO: 2631 - RNA, 38 nt, Artificial Sequence
  Description of Artificial Sequence:  Enzymatic Nucleic Acid
auucauugcugaugaggccguuaggccgaaacuugucu

SEQ ID NO: 2632 - RNA, 38 nt, Artificial Sequence
  Description of Artificial Sequence:  Enzymatic Nucleic Acid
gauucauucugaugaggccguuaggccgaaaacuuguc

SEQ ID NO: 2633 - RNA, 38 nt, Artificial Sequence
  Description of Artificial Sequence:  Enzymatic Nucleic Acid
cuugaagacugaugaggccguuaggccgaaauucauug

SEQ ID NO: 2634 - RNA, 38 nt, Artificial Sequence
  Description of Artificial Sequence:  Enzymatic Nucleic Acid
cacuugaacugaugaggccguuaggccgaaagauucau

SEQ ID NO: 2635 - RNA, 38 nt, Artificial Sequence
  Description of Artificial Sequence:  Enzymatic Nucleic Acid
uucacuugcugaugaggccguuaggccgaaagagauuc

SEQ ID NO: 2636 - RNA, 38 nt, Artificial Sequence
  Description of Artificial Sequence:  Enzymatic Nucleic Acid
auucacuucugaugaggccguuaggccgaaaagagauu

SEQ ID NO: 2637 - RNA, 38 nt, Artificial Sequence
  Description of Artificial Sequence:  Enzymatic Nucleic Acid
agcaguagcugaugaggccguuaggccgaaauucacuu

SEQ ID NO: 2638 - RNA, 38 nt, Artificial Sequence
  Description of Artificial Sequence:  Enzymatic Nucleic Acid
gagagcagcugaugaggccguuaggccgaaaguauuca

SEQ ID NO: 2639 - RNA, 38 nt, Artificial Sequence
  Description of Artificial Sequence:  Enzymatic Nucleic Acid
ugggaugacugaugaggccguuaggccgaaagcaguag

SEQ ID NO: 2640 - RNA, 38 nt, Artificial Sequence
  Description of Artificial Sequence:  Enzymatic Nucleic Acid
uuugggaucugaugaggccguuaggccgaaagagcagu

SEQ ID NO: 2641 - RNA, 38 nt, Artificial Sequence
  Description of Artificial Sequence:  Enzymatic Nucleic Acid
uccuuuggcugaugaggccguuaggccgaaaugagagc

SEQ ID NO: 2642 - RNA, 38 nt, Artificial Sequence
  Description of Artificial Sequence:  Enzymatic Nucleic Acid
cuuccucacugaugaggccguuaggccgaaaguuggcu

SEQ ID NO: 2643 - RNA, 38 nt, Artificial Sequence
  Description of Artificial Sequence:  Enzymatic Nucleic Acid
aacaaaaacugaugaggccguuaggccgaaacuuccuc

SEQ ID NO: 2644 - RNA, 38 nt, Artificial Sequence
  Description of Artificial Sequence:  Enzymatic Nucleic Acid
uaaacaaacugaugaggccguuaggccgaaagacuucc

SEQ ID NO: 2645 - RNA, 38 nt, Artificial Sequence
  Description of Artificial Sequence:  Enzymatic Nucleic Acid
uuaaacaacugaugaggccguuaggccgaaaagacuuc

SEQ ID NO: 2646 - RNA, 38 nt, Artificial Sequence
  Description of Artificial Sequence:  Enzymatic Nucleic Acid
uuuaaacacugaugaggccguuaggccgaaaaagacuu

SEQ ID NO: 2647 - RNA, 38 nt, Artificial Sequence
  Description of Artificial Sequence:  Enzymatic Nucleic Acid
guuuaaaccugaugaggccguuaggccgaaaaaagacu

SEQ ID NO: 2648 - RNA, 38 nt, Artificial Sequence
  Description of Artificial Sequence:  Enzymatic Nucleic Acid
cugguuuacugaugaggccguuaggccgaaacaaaaag

SEQ ID NO: 2649 - RNA, 38 nt, Artificial Sequence
  Description of Artificial Sequence:  Enzymatic Nucleic Acid
ucugguuucugaugaggccguuaggccgaaaacaaaaa

SEQ ID NO: 2650 - RNA, 38 nt, Artificial Sequence
  Description of Artificial Sequence:  Enzymatic Nucleic Acid
uucugguucugaugaggccguuaggccgaaaaacaaaa

SEQ ID NO: 2651 - RNA, 38 nt, Artificial Sequence
  Description of Artificial Sequence:  Enzymatic Nucleic Acid
ucaaaagucugaugaggccguuaggccgaaauguuuuc

SEQ ID NO: 2652 - RNA, 38 nt, Artificial Sequence
  Description of Artificial Sequence:  Enzymatic Nucleic Acid
uucaaaagcugaugaggccguuaggccgaaaauguuuu

SEQ ID NO: 2653 - RNA, 38 nt, Artificial Sequence
  Description of Artificial Sequence:  Enzymatic Nucleic Acid
auuuucaacugaugaggccguuaggccgaaaguaaugu

SEQ ID NO: 2654 - RNA, 38 nt, Artificial Sequence
  Description of Artificial Sequence:  Enzymatic Nucleic Acid
cauuuucacugaugaggccguuaggccgaaaaguaaug

SEQ ID NO: 2655 - RNA, 38 nt, Artificial Sequence
  Description of Artificial Sequence:  Enzymatic Nucleic Acid
ccauuuuccugaugaggccguuaggccgaaaaaguaau

SEQ ID NO: 2656 - RNA, 38 nt, Artificial Sequence
  Description of Artificial Sequence:  Enzymatic Nucleic Acid
aaugaaaacugaugaggccguuaggccgaaaucugugc

SEQ ID NO: 2657 - RNA, 38 nt, Artificial Sequence
  Description of Artificial Sequence:  Enzymatic Nucleic Acid
gcaaugaacugaugaggccguuaggccgaaagaucugu

SEQ ID NO: 2658 - RNA, 38 nt, Artificial Sequence
  Description of Artificial Sequence:  Enzymatic Nucleic Acid
agcaaugacugaugaggccguuaggccgaaaagaucug

SEQ ID NO: 2659 - RNA, 38 nt, Artificial Sequence
  Description of Artificial Sequence:  Enzymatic Nucleic Acid
uagcaaugcugaugaggccguuaggccgaaaaagaucu

SEQ ID NO: 2660 - RNA, 38 nt, Artificial Sequence
  Description of Artificial Sequence:  Enzymatic Nucleic Acid
auagcaaucugaugaggccguuaggccgaaaaaagauc

SEQ ID NO: 2661 - RNA, 38 nt, Artificial Sequence
  Description of Artificial Sequence:  Enzymatic Nucleic Acid
ugaauagccugaugaggccguuaggccgaaaugaaaag

SEQ ID NO: 2662 - RNA, 38 nt, Artificial Sequence
  Description of Artificial Sequence:  Enzymatic Nucleic Acid
agccugaacugaugaggccguuaggccgaaagcaauga

SEQ ID NO: 2663 - RNA, 38 nt, Artificial Sequence
  Description of Artificial Sequence:  Enzymatic Nucleic Acid
acagccugcugaugaggccguuaggccgaaauagcaau

SEQ ID NO: 2664 - RNA, 38 nt, Artificial Sequence
  Description of Artificial Sequence:  Enzymatic Nucleic Acid
aacagccucugaugaggccguuaggccgaaaauagcaa

SEQ ID NO: 2665 - RNA, 38 nt, Artificial Sequence
  Description of Artificial Sequence:  Enzymatic Nucleic Acid
accuuauccugaugaggccguuaggccgaaacagccug

SEQ ID NO: 2666 - RNA, 38 nt, Artificial Sequence
  Description of Artificial Sequence:  Enzymatic Nucleic Acid
aucgaccucugaugaggccguuaggccgaaaucaacag

SEQ ID NO: 2667 - RNA, 38 nt, Artificial Sequence
  Description of Artificial Sequence:  Enzymatic Nucleic Acid
uucagauccugaugaggccguuaggccgaaaccuuauc

SEQ ID NO: 2668 - RNA, 38 nt, Artificial Sequence
  Description of Artificial Sequence:  Enzymatic Nucleic Acid
ugauuucacugaugaggccguuaggccgaaaucgaccu

SEQ ID NO: 2669 - RNA, 38 nt, Artificial Sequence
  Description of Artificial Sequence:  Enzymatic Nucleic Acid
auauuucucugaugaggccguuaggccgaaauuucaga

SEQ ID NO: 2670 - RNA, 38 nt, Artificial Sequence
  Description of Artificial Sequence:  Enzymatic Nucleic Acid
auguuggacugaugaggccguuaggccgaaauuucuga

SEQ ID NO: 2671 - RNA, 38 nt, Artificial Sequence
  Description of Artificial Sequence:  Enzymatic Nucleic Acid
caauguugcugaugaggccguuaggccgaaauauuucu

SEQ ID NO: 2672 - RNA, 38 nt, Artificial Sequence
  Description of Artificial Sequence:  Enzymatic Nucleic Acid
acucgugccugaugaggccguuaggccgaaauguugga

SEQ ID NO: 2673 - RNA, 38 nt, Artificial Sequence
  Description of Artificial Sequence:  Enzymatic Nucleic Acid
aacaaagacugaugaggccguuaggccgaaacucgugc

SEQ ID NO: 2674 - RNA, 38 nt, Artificial Sequence
  Description of Artificial Sequence:  Enzymatic Nucleic Acid
uaaacaaacugaugaggccguuaggccgaaauacucgu

SEQ ID NO: 2675 - RNA, 38 nt, Artificial Sequence
  Description of Artificial Sequence:  Enzymatic Nucleic Acid
aauaaacacugaugaggccguuaggccgaaagauacuc

SEQ ID NO: 2676 - RNA, 38 nt, Artificial Sequence
  Description of Artificial Sequence:  Enzymatic Nucleic Acid
gaauaaaccugaugaggccguuaggccgaaaagauacu

SEQ ID NO: 2677 - RNA, 38 nt, Artificial Sequence
  Description of Artificial Sequence:  Enzymatic Nucleic Acid
gaggaauacugaugaggccguuaggccgaaacaaagau

SEQ ID NO: 2678 - RNA, 38 nt, Artificial Sequence
  Description of Artificial Sequence:  Enzymatic Nucleic Acid
ggaggaaucugaugaggccguuaggccgaaaacaaaga

SEQ ID NO: 2679 - RNA, 38 nt, Artificial Sequence
  Description of Artificial Sequence:  Enzymatic Nucleic Acid
uggaggaacugaugaggccguuaggccgaaaaacaaag

SEQ ID NO: 2680 - RNA, 38 nt, Artificial Sequence
  Description of Artificial Sequence:  Enzymatic Nucleic Acid
uguggaggcugaugaggccguuaggccgaaauaaacaa

SEQ ID NO: 2681 - RNA, 38 nt, Artificial Sequence
  Description of Artificial Sequence:  Enzymatic Nucleic Acid
cuguggagcugaugaggccguuaggccgaaaauaaaca

SEQ ID NO: 2682 - RNA, 38 nt, Artificial Sequence
  Description of Artificial Sequence:  Enzymatic Nucleic Acid
agucugugcugaugaggccguuaggccgaaaggaauaa

SEQ ID NO: 2683 - RNA, 38 nt, Artificial Sequence
  Description of Artificial Sequence:  Enzymatic Nucleic Acid
cucuggcgcugaugaggccguuaggccgaaagucugug

SEQ ID NO: 2684 - RNA, 38 nt, Artificial Sequence
  Description of Artificial Sequence:  Enzymatic Nucleic Acid
aucaggaccugaugaggccguuaggccgaaaggugucu

SEQ ID NO: 2685 - RNA, 38 nt, Artificial Sequence
  Description of Artificial Sequence:  Enzymatic Nucleic Acid
uucaucagcugaugaggccguuaggccgaaacuaggug

SEQ ID NO: 2686 - RNA, 38 nt, Artificial Sequence
  Description of Artificial Sequence:  Enzymatic Nucleic Acid
aaggagcacugaugaggccguuaggccgaaacguuuca

SEQ ID NO: 2687 - RNA, 38 nt, Artificial Sequence
  Description of Artificial Sequence:  Enzymatic Nucleic Acid
aggacaagcugaugaggccguuaggccgaaagcagacg

SEQ ID NO: 2688 - RNA, 38 nt, Artificial Sequence
  Description of Artificial Sequence:  Enzymatic Nucleic Acid
auuaggaccugaugaggccguuaggccgaaaggagcag

SEQ ID NO: 2689 - RNA, 38 nt, Artificial Sequence
  Description of Artificial Sequence:  Enzymatic Nucleic Acid
aauauuagcugaugaggccguuaggccgaaacaaggag

SEQ ID NO: 2690 - RNA, 38 nt, Artificial Sequence
  Description of Artificial Sequence:  Enzymatic Nucleic Acid
augaauaucugaugaggccguuaggccgaaaggacaag

SEQ ID NO: 2691 - RNA, 38 nt, Artificial Sequence
  Description of Artificial Sequence:  Enzymatic Nucleic Acid
gauaugaacugaugaggccguuaggccgaaauuaggac

SEQ ID NO: 2692 - RNA, 38 nt, Artificial Sequence
  Description of Artificial Sequence:  Enzymatic Nucleic Acid
uugauaugcugaugaggccguuaggccgaaauauuagg

SEQ ID NO: 2693 - RNA, 38 nt, Artificial Sequence
  Description of Artificial Sequence:  Enzymatic Nucleic Acid
guugauaucugaugaggccguuaggccgaaaauauuag

SEQ ID NO: 2694 - RNA, 38 nt, Artificial Sequence
  Description of Artificial Sequence:  Enzymatic Nucleic Acid
gcuguugacugaugaggccguuaggccgaaaugaauau

SEQ ID NO: 2695 - RNA, 38 nt, Artificial Sequence
  Description of Artificial Sequence:  Enzymatic Nucleic Acid
gugcuguucugaugaggccguuaggccgaaauaugaau

SEQ ID NO: 2696 - RNA, 38 nt, Artificial Sequence
  Description of Artificial Sequence:  Enzymatic Nucleic Acid
augccaggcugaugaggccguuaggccgaaauggugcu

SEQ ID NO: 2697 - RNA, 38 nt, Artificial Sequence
  Description of Artificial Sequence:  Enzymatic Nucleic Acid
aaugccagcugaugaggccguuaggccgaaaauggugc

SEQ ID NO: 2698 - RNA, 38 nt, Artificial Sequence
  Description of Artificial Sequence:  Enzymatic Nucleic Acid
aaaaugugcugaugaggccguuaggccgaaaugccagg

SEQ ID NO: 2699 - RNA, 38 nt, Artificial Sequence
  Description of Artificial Sequence:  Enzymatic Nucleic Acid
uaaaaugucugaugaggccguuaggccgaaaaugccag

SEQ ID NO: 2700 - RNA, 38 nt, Artificial Sequence
  Description of Artificial Sequence:  Enzymatic Nucleic Acid
auuuuuaacugaugaggccguuaggccgaaaugugaau

SEQ ID NO: 2701 - RNA, 38 nt, Artificial Sequence
  Description of Artificial Sequence:  Enzymatic Nucleic Acid
aauuuuuacugaugaggccguuaggccgaaaaugugaa

SEQ ID NO: 2702 - RNA, 38 nt, Artificial Sequence
  Description of Artificial Sequence:  Enzymatic Nucleic Acid
uaauuuuucugaugaggccguuaggccgaaaaauguga

SEQ ID NO: 2703 - RNA, 38 nt, Artificial Sequence
  Description of Artificial Sequence:  Enzymatic Nucleic Acid
auaauuuucugaugaggccguuaggccgaaaaaaugug

SEQ ID NO: 2704 - RNA, 38 nt, Artificial Sequence
  Description of Artificial Sequence:  Enzymatic Nucleic Acid
uuccacaucugaugaggccguuaggccgaaauuuuuaa

SEQ ID NO: 2705 - RNA, 38 nt, Artificial Sequence
  Description of Artificial Sequence:  Enzymatic Nucleic Acid
cuuccacacugaugaggccguuaggccgaaaauuuuua

SEQ ID NO: 2706 - RNA, 38 nt, Artificial Sequence
  Description of Artificial Sequence:  Enzymatic Nucleic Acid
aguucucccugaugaggccguuaggccgaaauccacuu

SEQ ID NO: 2707 - RNA, 38 nt, Artificial Sequence
  Description of Artificial Sequence:  Enzymatic Nucleic Acid
aggcuauucugaugaggccguuaggccgaaacagcugc

SEQ ID NO: 2708 - RNA, 38 nt, Artificial Sequence
  Description of Artificial Sequence:  Enzymatic Nucleic Acid
cccuaggccugaugaggccguuaggccgaaauugacag

SEQ ID NO: 2709 - RNA, 38 nt, Artificial Sequence
  Description of Artificial Sequence:  Enzymatic Nucleic Acid
uucagccccugaugaggccguuaggccgaaaggcuauu

SEQ ID NO: 2710 - RNA, 38 nt, Artificial Sequence
  Description of Artificial Sequence:  Enzymatic Nucleic Acid
cugacaaacugaugaggccguuaggccgaaauucagcc

SEQ ID NO: 2711 - RNA, 38 nt, Artificial Sequence
  Description of Artificial Sequence:  Enzymatic Nucleic Acid
ucugacaacugaugaggccguuaggccgaaaauucagc

SEQ ID NO: 2712 - RNA, 38 nt, Artificial Sequence
  Description of Artificial Sequence:  Enzymatic Nucleic Acid
aucugacacugaugaggccguuaggccgaaaaauucag

SEQ ID NO: 2713 - RNA, 38 nt, Artificial Sequence
  Description of Artificial Sequence:  Enzymatic Nucleic Acid
uaucugaccugaugaggccguuaggccgaaaaaauuca

SEQ ID NO: 2714 - RNA, 38 nt, Artificial Sequence
  Description of Artificial Sequence:  Enzymatic Nucleic Acid
auuuaucucugaugaggccguuaggccgaaacaaaaau

SEQ ID NO: 2715 - RNA, 38 nt, Artificial Sequence
  Description of Artificial Sequence:  Enzymatic Nucleic Acid
auuuuauucugaugaggccguuaggccgaaaucugaca

SEQ ID NO: 2716 - RNA, 38 nt, Artificial Sequence
  Description of Artificial Sequence:  Enzymatic Nucleic Acid
auuuauuucugaugaggccguuaggccgaaauuuaucu

SEQ ID NO: 2717 - RNA, 38 nt, Artificial Sequence
  Description of Artificial Sequence:  Enzymatic Nucleic Acid
gaaugauucugaugaggccguuaggccgaaauuuuauu

SEQ ID NO: 2718 - RNA, 38 nt, Artificial Sequence
  Description of Artificial Sequence:  Enzymatic Nucleic Acid
ggaugaaucugaugaggccguuaggccgaaauuuauuu

SEQ ID NO: 2719 - RNA, 38 nt, Artificial Sequence
  Description of Artificial Sequence:  Enzymatic Nucleic Acid
aaaggaugcugaugaggccguuaggccgaaaugauuua

SEQ ID NO: 2720 - RNA, 38 nt, Artificial Sequence
  Description of Artificial Sequence:  Enzymatic Nucleic Acid
aaaaggaucugaugaggccguuaggccgaaaaugauuu

SEQ ID NO: 2721 - RNA, 38 nt, Artificial Sequence
  Description of Artificial Sequence:  Enzymatic Nucleic Acid
aaaaaaagcugaugaggccguuaggccgaaaugaauga

SEQ ID NO: 2722 - RNA, 38 nt, Artificial Sequence
  Description of Artificial Sequence:  Enzymatic Nucleic Acid
aucaaaaacugaugaggccguuaggccgaaaggaugaa

SEQ ID NO: 2723 - RNA, 38 nt, Artificial Sequence
  Description of Artificial Sequence:  Enzymatic Nucleic Acid
aaucaaaacugaugaggccguuaggccgaaaaggauga

SEQ ID NO: 2724 - RNA, 38 nt, Artificial Sequence
  Description of Artificial Sequence:  Enzymatic Nucleic Acid
uaaucaaacugaugaggccguuaggccgaaaaaggaug

SEQ ID NO: 2725 - RNA, 38 nt, Artificial Sequence
  Description of Artificial Sequence:  Enzymatic Nucleic Acid
auaaucaacugaugaggccguuaggccgaaaaaaggau

SEQ ID NO: 2726 - RNA, 38 nt, Artificial Sequence
  Description of Artificial Sequence:  Enzymatic Nucleic Acid
uauaaucacugaugaggccguuaggccgaaaaaaagga

SEQ ID NO: 2727 - RNA, 38 nt, Artificial Sequence
  Description of Artificial Sequence:  Enzymatic Nucleic Acid
uuauaauccugaugaggccguuaggccgaaaaaaaagg

SEQ ID NO: 2728 - RNA, 38 nt, Artificial Sequence
  Description of Artificial Sequence:  Enzymatic Nucleic Acid
aauuuuaucugaugaggccguuaggccgaaaucaaaaa

SEQ ID NO: 2729 - RNA, 38 nt, Artificial Sequence
  Description of Artificial Sequence:  Enzymatic Nucleic Acid
aaauuuuacugaugaggccguuaggccgaaaaucaaaa

SEQ ID NO: 2730 - RNA, 38 nt, Artificial Sequence
  Description of Artificial Sequence:  Enzymatic Nucleic Acid
gaaaauuucugaugaggccguuaggccgaaauaaucaa

SEQ ID NO: 2731 - RNA, 38 nt, Artificial Sequence
  Description of Artificial Sequence:  Enzymatic Nucleic Acid
uuuuagaacugaugaggccguuaggccgaaauuuuaua

SEQ ID NO: 2732 - RNA, 38 nt, Artificial Sequence
  Description of Artificial Sequence:  Enzymatic Nucleic Acid
auuuuagacugaugaggccguuaggccgaaaauuuuau

SEQ ID NO: 2733 - RNA, 38 nt, Artificial Sequence
  Description of Artificial Sequence:  Enzymatic Nucleic Acid
cauuuuagcugaugaggccguuaggccgaaaaauuuua

SEQ ID NO: 2734 - RNA, 38 nt, Artificial Sequence
  Description of Artificial Sequence:  Enzymatic Nucleic Acid
acauuuuacugaugaggccguuaggccgaaaaaauuuu

SEQ ID NO: 2735 - RNA, 38 nt, Artificial Sequence
  Description of Artificial Sequence:  Enzymatic Nucleic Acid
auacauuucugaugaggccguuaggccgaaagaaaauu

SEQ ID NO: 2736 - RNA, 38 nt, Artificial Sequence
  Description of Artificial Sequence:  Enzymatic Nucleic Acid
gucuaaaacugaugaggccguuaggccgaaacauuuua

SEQ ID NO: 2737 - RNA, 38 nt, Artificial Sequence
  Description of Artificial Sequence:  Enzymatic Nucleic Acid
aagucuaacugaugaggccguuaggccgaaauacauuu

SEQ ID NO: 2738 - RNA, 38 nt, Artificial Sequence
  Description of Artificial Sequence:  Enzymatic Nucleic Acid
gaagucuacugaugaggccguuaggccgaaaauacauu

SEQ ID NO: 2739 - RNA, 38 nt, Artificial Sequence
  Description of Artificial Sequence:  Enzymatic Nucleic Acid
ggaagucucugaugaggccguuaggccgaaaaauacau

SEQ ID NO: 2740 - RNA, 38 nt, Artificial Sequence
  Description of Artificial Sequence:  Enzymatic Nucleic Acid
aggaaguccugaugaggccguuaggccgaaaaaauaca

SEQ ID NO: 2741 - RNA, 38 nt, Artificial Sequence
  Description of Artificial Sequence:  Enzymatic Nucleic Acid
ccuacaggcugaugaggccguuaggccgaaagucuaaa

SEQ ID NO: 2742 - RNA, 38 nt, Artificial Sequence
  Description of Artificial Sequence:  Enzymatic Nucleic Acid
cccuacagcugaugaggccguuaggccgaaaagucuaa

SEQ ID NO: 2743 - RNA, 38 nt, Artificial Sequence
  Description of Artificial Sequence:  Enzymatic Nucleic Acid
ucgccccccugaugaggccguuaggccgaaacaggaag

SEQ ID NO: 2744 - RNA, 38 nt, Artificial Sequence
  Description of Artificial Sequence:  Enzymatic Nucleic Acid
auuuaguacugaugaggccguuaggccgaaaucgcccc

SEQ ID NO: 2745 - RNA, 38 nt, Artificial Sequence
  Description of Artificial Sequence:  Enzymatic Nucleic Acid
acauuuagcugaugaggccguuaggccgaaauaucgcc

SEQ ID NO: 2746 - RNA, 38 nt, Artificial Sequence
  Description of Artificial Sequence:  Enzymatic Nucleic Acid
uauacauucugaugaggccguuaggccgaaaguauauc

SEQ ID NO: 2747 - RNA, 38 nt, Artificial Sequence
  Description of Artificial Sequence:  Enzymatic Nucleic Acid
guacuauacugaugaggccguuaggccgaaacauuuag

SEQ ID NO: 2748 - RNA, 38 nt, Artificial Sequence
  Description of Artificial Sequence:  Enzymatic Nucleic Acid
auguacuacugaugaggccguuaggccgaaauacauuu

SEQ ID NO: 2749 - RNA, 38 nt, Artificial Sequence
  Description of Artificial Sequence:  Enzymatic Nucleic Acid
aaauguaccugaugaggccguuaggccgaaauauacau

SEQ ID NO: 2750 - RNA, 38 nt, Artificial Sequence
  Description of Artificial Sequence:  Enzymatic Nucleic Acid
uauaaaugcugaugaggccguuaggccgaaacuauaua

SEQ ID NO: 2751 - RNA, 38 nt, Artificial Sequence
  Description of Artificial Sequence:  Enzymatic Nucleic Acid
uuaguauacugaugaggccguuaggccgaaauguacua

SEQ ID NO: 2752 - RNA, 38 nt, Artificial Sequence
  Description of Artificial Sequence:  Enzymatic Nucleic Acid
uuuaguaucugaugaggccguuaggccgaaaauguacu

SEQ ID NO: 2753 - RNA, 38 nt, Artificial Sequence
  Description of Artificial Sequence:  Enzymatic Nucleic Acid
auuuaguacugaugaggccguuaggccgaaaaauguac

SEQ ID NO: 2754 - RNA, 38 nt, Artificial Sequence
  Description of Artificial Sequence:  Enzymatic Nucleic Acid
acauuuagcugaugaggccguuaggccgaaauaaaugu

SEQ ID NO: 2755 - RNA, 38 nt, Artificial Sequence
  Description of Artificial Sequence:  Enzymatic Nucleic Acid
aauacauucugaugaggccguuaggccgaaaguauaaa

SEQ ID NO: 2756 - RNA, 38 nt, Artificial Sequence
  Description of Artificial Sequence:  Enzymatic Nucleic Acid
uacaggaacugaugaggccguuaggccgaaacauuuag

SEQ ID NO: 2757 - RNA, 38 nt, Artificial Sequence
  Description of Artificial Sequence:  Enzymatic Nucleic Acid
ccuacaggcugaugaggccguuaggccgaaauacauuu

SEQ ID NO: 2758 - RNA, 38 nt, Artificial Sequence
  Description of Artificial Sequence:  Enzymatic Nucleic Acid
cccuacagcugaugaggccguuaggccgaaaauacauu

SEQ ID NO: 2759 - RNA, 38 nt, Artificial Sequence
  Description of Artificial Sequence:  Enzymatic Nucleic Acid
ucgccccccugaugaggccguuaggccgaaacaggaau

SEQ ID NO: 2760 - RNA, 38 nt, Artificial Sequence
  Description of Artificial Sequence:  Enzymatic Nucleic Acid
aauacauucugaugaggccguuaggccgaaaguauauc

SEQ ID NO: 2761 - RNA, 38 nt, Artificial Sequence
  Description of Artificial Sequence:  Enzymatic Nucleic Acid
gucuaaaacugaugaggccguuaggccgaaacauuuag

SEQ ID NO: 2762 - RNA, 38 nt, Artificial Sequence
  Description of Artificial Sequence:  Enzymatic Nucleic Acid
uuuuauuucugaugaggccguuaggccgaaaucgcccc

SEQ ID NO: 2763 - RNA, 38 nt, Artificial Sequence
  Description of Artificial Sequence:  Enzymatic Nucleic Acid
uagcauuucugaugaggccguuaggccgaaauuuuauc

SEQ ID NO: 2764 - RNA, 38 nt, Artificial Sequence
  Description of Artificial Sequence:  Enzymatic Nucleic Acid
caguuguucugaugaggccguuaggccgaaagcauuuu

SEQ ID NO: 2765 - RNA, 38 nt, Artificial Sequence
  Description of Artificial Sequence:  Enzymatic Nucleic Acid
  misc_feature (31)..(31): n stands for inosine
guaccaaacugaugaggccguuaggccgaancauuagc

SEQ ID NO: 2766 - RNA, 38 nt, Artificial Sequence
  Description of Artificial Sequence:  Enzymatic Nucleic Acid
  misc_feature (31)..(31): n stands for inosine
cauccauucugaugaggccguuaggccgaanuaccaaa

SEQ ID NO: 2767 - RNA, 38 nt, Artificial Sequence
  Description of Artificial Sequence:  Enzymatic Nucleic Acid
  misc_feature (31)..(31): n stands for inosine
cuuaaacacugaugaggccguuaggccgaanaaaauau

SEQ ID NO: 2768 - RNA, 38 nt, Artificial Sequence
  Description of Artificial Sequence:  Enzymatic Nucleic Acid
  misc_feature (31)..(31): n stands for inosine
ccucuucacugaugaggccguuaggccgaancuccccu

SEQ ID NO: 2769 - RNA, 38 nt, Artificial Sequence
  Description of Artificial Sequence:  Enzymatic Nucleic Acid
  misc_feature (31)..(31): n stands for inosine
cagaugcucugaugaggccguuaggccgaanacauaac

SEQ ID NO: 2770 - RNA, 38 nt, Artificial Sequence
  Description of Artificial Sequence:  Enzymatic Nucleic Acid
  misc_feature (31)..(31): n stands for inosine
gugccagacugaugaggccguuaggccgaancuugaca

SEQ ID NO: 2771 - RNA, 38 nt, Artificial Sequence
  Description of Artificial Sequence:  Enzymatic Nucleic Acid
  misc_feature (31)..(31): n stands for inosine
gcugugcccugaugaggccguuaggccgaanaugcuug

SEQ ID NO: 2772 - RNA, 38 nt, Artificial Sequence
  Description of Artificial Sequence:  Enzymatic Nucleic Acid
  misc_feature (31)..(31): n stands for inosine
uucagcugcugaugaggccguuaggccgaanccagaug

SEQ ID NO: 2773 - RNA, 38 nt, Artificial Sequence
  Description of Artificial Sequence:  Enzymatic Nucleic Acid
  misc_feature (31)..(31): n stands for inosine
ccuucagccugaugaggccguuaggccgaanugccaga

SEQ ID NO: 2774 - RNA, 38 nt, Artificial Sequence
  Description of Artificial Sequence:  Enzymatic Nucleic Acid
  misc_feature (31)..(31): n stands for inosine
cugccuuccugaugaggccguuaggccgaancugugcc

SEQ ID NO: 2775 - RNA, 38 nt, Artificial Sequence
  Description of Artificial Sequence:  Enzymatic Nucleic Acid
  misc_feature (31)..(31): n stands for inosine
uuuccauccugaugaggccguuaggccgaanccuucag

SEQ ID NO: 2776 - RNA, 38 nt, Artificial Sequence
  Description of Artificial Sequence:  Enzymatic Nucleic Acid
  misc_feature (31)..(31): n stands for inosine
ugcguacucugaugaggccguuaggccgaanuaaauau

SEQ ID NO: 2777 - RNA, 38 nt, Artificial Sequence
  Description of Artificial Sequence:  Enzymatic Nucleic Acid
  misc_feature (31)..(31): n stands for inosine
ucucaaaucugaugaggccguuaggccgaancguacuu

SEQ ID NO: 2778 - RNA, 38 nt, Artificial Sequence
  Description of Artificial Sequence:  Enzymatic Nucleic Acid
  misc_feature (31)..(31): n stands for inosine
aauaucuucugaugaggccguuaggccgaanucucaaa

SEQ ID NO: 2779 - RNA, 38 nt, Artificial Sequence
  Description of Artificial Sequence:  Enzymatic Nucleic Acid
  misc_feature (31)..(31): n stands for inosine
uaggagaacugaugaggccguuaggccgaanauaacaa

SEQ ID NO: 2780 - RNA, 38 nt, Artificial Sequence
  Description of Artificial Sequence:  Enzymatic Nucleic Acid
  misc_feature (31)..(31): n stands for inosine
ucaauaggcugaugaggccguuaggccgaanaaugaua

SEQ ID NO: 2781 - RNA, 38 nt, Artificial Sequence
  Description of Artificial Sequence:  Enzymatic Nucleic Acid
  misc_feature (31)..(31): n stands for inosine
cuucaauacugaugaggccguuaggccgaanagaauga

SEQ ID NO: 2782 - RNA, 38 nt, Artificial Sequence
  Description of Artificial Sequence:  Enzymatic Nucleic Acid
  misc_feature (31)..(31): n stands for inosine
ucuucaaucugaugaggccguuaggccgaangagaaug

SEQ ID NO: 2783 - RNA, 38 nt, Artificial Sequence
  Description of Artificial Sequence:  Enzymatic Nucleic Acid
  misc_feature (31)..(31): n stands for inosine
auugcucucugaugaggccguuaggccgaanucuucaa

SEQ ID NO: 2784 - RNA, 38 nt, Artificial Sequence
  Description of Artificial Sequence:  Enzymatic Nucleic Acid
  misc_feature (31)..(31): n stands for inosine
uuuacuaucugaugaggccguuaggccgaancucuugu

SEQ ID NO: 2785 - RNA, 38 nt, Artificial Sequence
  Description of Artificial Sequence:  Enzymatic Nucleic Acid
  misc_feature (31)..(31): n stands for inosine
accugaugcugaugaggccguuaggccgaanuuuuacu

SEQ ID NO: 2786 - RNA, 38 nt, Artificial Sequence
  Description of Artificial Sequence:  Enzymatic Nucleic Acid
  misc_feature (31)..(31): n stands for inosine
ugaccugacugaugaggccguuaggccgaanuguuuua

SEQ ID NO: 2787 - RNA, 38 nt, Artificial Sequence
  Description of Artificial Sequence:  Enzymatic Nucleic Acid
  misc_feature (31)..(31): n stands for inosine
cccugacccugaugaggccguuaggccgaanauguguu

SEQ ID NO: 2788 - RNA, 38 nt, Artificial Sequence
  Description of Artificial Sequence:  Enzymatic Nucleic Acid
  misc_feature (31)..(31): n stands for inosine
uaaccccccugaugaggccguuaggccgaanaccugau

SEQ ID NO: 2789 - RNA, 38 nt, Artificial Sequence
  Description of Artificial Sequence:  Enzymatic Nucleic Acid
  misc_feature (31)..(31): n stands for inosine
uuaucacacugaugaggccguuaggccgaanucuuuaa

SEQ ID NO: 2790 - RNA, 38 nt, Artificial Sequence
  Description of Artificial Sequence:  Enzymatic Nucleic Acid
  misc_feature (31)..(31): n stands for inosine
uuuaucaccugaugaggccguuaggccgaangucuuua

SEQ ID NO: 2791 - RNA, 38 nt, Artificial Sequence
  Description of Artificial Sequence:  Enzymatic Nucleic Acid
  misc_feature (31)..(31): n stands for inosine
ucggaagucugaugaggccguuaggccgaanuuuauca

SEQ ID NO: 2792 - RNA, 38 nt, Artificial Sequence
  Description of Artificial Sequence:  Enzymatic Nucleic Acid
  misc_feature (31)..(31): n stands for inosine
aucggaagcugaugaggccguuaggccgaanguuuauc

SEQ ID NO: 2793 - RNA, 38 nt, Artificial Sequence
  Description of Artificial Sequence:  Enzymatic Nucleic Acid
  misc_feature (31)..(31): n stands for inosine
uuaucggacugaugaggccguuaggccgaanugguuua

SEQ ID NO: 2794 - RNA, 38 nt, Artificial Sequence
  Description of Artificial Sequence:  Enzymatic Nucleic Acid
  misc_feature (31)..(31): n stands for inosine
aacuuauccugaugaggccguuaggccgaanaaguggu

SEQ ID NO: 2795 - RNA, 38 nt, Artificial Sequence
  Description of Artificial Sequence:  Enzymatic Nucleic Acid
  misc_feature (31)..(31): n stands for inosine
gaaaauaucugaugaggccguuaggccgaanacacacg

SEQ ID NO: 2796 - RNA, 38 nt, Artificial Sequence
  Description of Artificial Sequence:  Enzymatic Nucleic Acid
  misc_feature (31)..(31): n stands for inosine
uacagauacugaugaggccguuaggccgaanaaaauau

SEQ ID NO: 2797 - RNA, 38 nt, Artificial Sequence
  Description of Artificial Sequence:  Enzymatic Nucleic Acid
  misc_feature (31)..(31): n stands for inosine
auauauaccugaugaggccguuaggccgaanauaugaa

SEQ ID NO: 2798 - RNA, 38 nt, Artificial Sequence
  Description of Artificial Sequence:  Enzymatic Nucleic Acid
  misc_feature (31)..(31): n stands for inosine
uacgaaggcugaugaggccguuaggccgaanucuuucu

SEQ ID NO: 2799 - RNA, 38 nt, Artificial Sequence
  Description of Artificial Sequence:  Enzymatic Nucleic Acid
  misc_feature (31)..(31): n stands for inosine
guuacgaacugaugaggccguuaggccgaanugucuuu

SEQ ID NO: 2800 - RNA, 38 nt, Artificial Sequence
  Description of Artificial Sequence:  Enzymatic Nucleic Acid
  misc_feature (31)..(31): n stands for inosine
gguuacgacugaugaggccguuaggccgaangugucuu

SEQ ID NO: 2801 - RNA, 38 nt, Artificial Sequence
  Description of Artificial Sequence:  Enzymatic Nucleic Acid
  misc_feature (31)..(31): n stands for inosine
aaaaugcgcugaugaggccguuaggccgaanuuacgaa

SEQ ID NO: 2802 - RNA, 38 nt, Artificial Sequence
  Description of Artificial Sequence:  Enzymatic Nucleic Acid
  misc_feature (31)..(31): n stands for inosine
gaaaaugccugaugaggccguuaggccgaanguuacga

SEQ ID NO: 2803 - RNA, 38 nt, Artificial Sequence
  Description of Artificial Sequence:  Enzymatic Nucleic Acid
  misc_feature (31)..(31): n stands for inosine
uuggaaaacugaugaggccguuaggccgaancggguua

SEQ ID NO: 2804 - RNA, 38 nt, Artificial Sequence
  Description of Artificial Sequence:  Enzymatic Nucleic Acid
  misc_feature (31)..(31): n stands for inosine
cucucuuucugaugaggccguuaggccgaanaaaaugc

SEQ ID NO: 2805 - RNA, 38 nt, Artificial Sequence
  Description of Artificial Sequence:  Enzymatic Nucleic Acid
  misc_feature (31)..(31): n stands for inosine
ccucucuucugaugaggccguuaggccgaangaaaaug

SEQ ID NO: 2806 - RNA, 38 nt, Artificial Sequence
  Description of Artificial Sequence:  Enzymatic Nucleic Acid
  misc_feature (31)..(31): n stands for inosine
ucucccugcugaugaggccguuaggccgaanauuccuc

SEQ ID NO: 2807 - RNA, 38 nt, Artificial Sequence
  Description of Artificial Sequence:  Enzymatic Nucleic Acid
  misc_feature (31)..(31): n stands for inosine
caucuccccugaugaggccguuaggccgaanugauucc

SEQ ID NO: 2808 - RNA, 38 nt, Artificial Sequence
  Description of Artificial Sequence:  Enzymatic Nucleic Acid
  misc_feature (31)..(31): n stands for inosine
cccauugccugaugaggccguuaggccgaanuacaucu

SEQ ID NO: 2809 - RNA, 38 nt, Artificial Sequence
  Description of Artificial Sequence:  Enzymatic Nucleic Acid
  misc_feature (31)..(31): n stands for inosine
ggccccaucugaugaggccguuaggccgaancuguaca

SEQ ID NO: 2810 - RNA, 38 nt, Artificial Sequence
  Description of Artificial Sequence:  Enzymatic Nucleic Acid
  misc_feature (31)..(31): n stands for inosine
ucuuaaaucugaugaggccguuaggccgaanccccauu

SEQ ID NO: 2811 - RNA, 38 nt, Artificial Sequence
  Description of Artificial Sequence:  Enzymatic Nucleic Acid
  misc_feature (31)..(31): n stands for inosine
cucuuaaacugaugaggccguuaggccgaangccccau

SEQ ID NO: 2812 - RNA, 38 nt, Artificial Sequence
  Description of Artificial Sequence:  Enzymatic Nucleic Acid
  misc_feature (31)..(31): n stands for inosine
augaacaccugaugaggccguuaggccgaanaacucuu

SEQ ID NO: 2813 - RNA, 38 nt, Artificial Sequence
  Description of Artificial Sequence:  Enzymatic Nucleic Acid
  misc_feature (31)..(31): n stands for inosine
aaucaagacugaugaggccguuaggccgaanaacacag

SEQ ID NO: 2814 - RNA, 38 nt, Artificial Sequence
  Description of Artificial Sequence:  Enzymatic Nucleic Acid
  misc_feature (31)..(31): n stands for inosine
aagaaucacugaugaggccguuaggccgaanaugaaca

SEQ ID NO: 2815 - RNA, 38 nt, Artificial Sequence
  Description of Artificial Sequence:  Enzymatic Nucleic Acid
  misc_feature (31)..(31): n stands for inosine
gaaggugacugaugaggccguuaggccgaanaaucaag

SEQ ID NO: 2816 - RNA, 38 nt, Artificial Sequence
  Description of Artificial Sequence:  Enzymatic Nucleic Acid
  misc_feature (31)..(31): n stands for inosine
cuagaaggcugaugaggccguuaggccgaanaagaauc

SEQ ID NO: 2817 - RNA, 38 nt, Artificial Sequence
  Description of Artificial Sequence:  Enzymatic Nucleic Acid
  misc_feature (31)..(31): n stands for inosine
uucuagaacugaugaggccguuaggccgaanugaagaa

SEQ ID NO: 2818 - RNA, 38 nt, Artificial Sequence
  Description of Artificial Sequence:  Enzymatic Nucleic Acid
  misc_feature (31)..(31): n stands for inosine
cuucuagacugaugaggccguuaggccgaangugaaga

SEQ ID NO: 2819 - RNA, 38 nt, Artificial Sequence
  Description of Artificial Sequence:  Enzymatic Nucleic Acid
  misc_feature (31)..(31): n stands for inosine
ccccuucucugaugaggccguuaggccgaanaagguga

SEQ ID NO: 2820 - RNA, 38 nt, Artificial Sequence
  Description of Artificial Sequence:  Enzymatic Nucleic Acid
  misc_feature (31)..(31): n stands for inosine
uuacucagcugaugaggccguuaggccgaanccccuuc

SEQ ID NO: 2821 - RNA, 38 nt, Artificial Sequence
  Description of Artificial Sequence:  Enzymatic Nucleic Acid
  misc_feature (31)..(31): n stands for inosine
auuacucacugaugaggccguuaggccgaangccccuu

SEQ ID NO: 2822 - RNA, 38 nt, Artificial Sequence
  Description of Artificial Sequence:  Enzymatic Nucleic Acid
  misc_feature (31)..(31): n stands for inosine
aauuacuccugaugaggccguuaggccgaanggccccu

SEQ ID NO: 2823 - RNA, 38 nt, Artificial Sequence
  Description of Artificial Sequence:  Enzymatic Nucleic Acid
  misc_feature (31)..(31): n stands for inosine
ugaaugagcugaugaggccguuaggccgaanaauuacu

SEQ ID NO: 2824 - RNA, 38 nt, Artificial Sequence
  Description of Artificial Sequence:  Enzymatic Nucleic Acid
  misc_feature (31)..(31): n stands for inosine
gcugaaugcugaugaggccguuaggccgaanugaauua

SEQ ID NO: 2825 - RNA, 38 nt, Artificial Sequence
  Description of Artificial Sequence:  Enzymatic Nucleic Acid
  misc_feature (31)..(31): n stands for inosine
cagcugaacugaugaggccguuaggccgaanagugaau

SEQ ID NO: 2826 - RNA, 38 nt, Artificial Sequence
  Description of Artificial Sequence:  Enzymatic Nucleic Acid
  misc_feature (31)..(31): n stands for inosine
uguucagccugaugaggccguuaggccgaanaaugagu

SEQ ID NO: 2827 - RNA, 38 nt, Artificial Sequence
  Description of Artificial Sequence:  Enzymatic Nucleic Acid
  misc_feature (31)..(31): n stands for inosine
uguuguuccugaugaggccguuaggccgaancugaaug

SEQ ID NO: 2828 - RNA, 38 nt, Artificial Sequence
  Description of Artificial Sequence:  Enzymatic Nucleic Acid
  misc_feature (31)..(31): n stands for inosine
gccauugucugaugaggccguuaggccgaanuucagcu

SEQ ID NO: 2829 - RNA, 38 nt, Artificial Sequence
  Description of Artificial Sequence:  Enzymatic Nucleic Acid
  misc_feature (31)..(31): n stands for inosine
auagccaucugaugaggccguuaggccgaanuuguuca

SEQ ID NO: 2830 - RNA, 38 nt, Artificial Sequence
  Description of Artificial Sequence:  Enzymatic Nucleic Acid
  misc_feature (31)..(31): n stands for inosine
gccuucaucugaugaggccguuaggccgaanccauugu

SEQ ID NO: 2831 - RNA, 38 nt, Artificial Sequence
  Description of Artificial Sequence:  Enzymatic Nucleic Acid
  misc_feature (31)..(31): n stands for inosine
aacgacaacugaugaggccguuaggccgaanccuucau

SEQ ID NO: 2832 - RNA, 38 nt, Artificial Sequence
  Description of Artificial Sequence:  Enzymatic Nucleic Acid
  misc_feature (31)..(31): n stands for inosine
gggucgaucugaugaggccguuaggccgaancaacgac

SEQ ID NO: 2833 - RNA, 38 nt, Artificial Sequence
  Description of Artificial Sequence:  Enzymatic Nucleic Acid
  misc_feature (31)..(31): n stands for inosine
cacauuggcugaugaggccguuaggccgaanucgauug

SEQ ID NO: 2834 - RNA, 38 nt, Artificial Sequence
  Description of Artificial Sequence:  Enzymatic Nucleic Acid
  misc_feature (31)..(31): n stands for inosine
gcacauugcugaugaggccguuaggccgaangucgauu

SEQ ID NO: 2835 - RNA, 38 nt, Artificial Sequence
  Description of Artificial Sequence:  Enzymatic Nucleic Acid
  misc_feature (31)..(31): n stands for inosine
ggcacauucugaugaggccguuaggccgaanggucgau

SEQ ID NO: 2836 - RNA, 38 nt, Artificial Sequence
  Description of Artificial Sequence:  Enzymatic Nucleic Acid
  misc_feature (31)..(31): n stands for inosine
uggcacaucugaugaggccguuaggccgaangggucga

SEQ ID NO: 2837 - RNA, 38 nt, Artificial Sequence
  Description of Artificial Sequence:  Enzymatic Nucleic Acid
  misc_feature (31)..(31): n stands for inosine
caucuucucugaugaggccguuaggccgaancacauug

SEQ ID NO: 2838 - RNA, 38 nt, Artificial Sequence
  Description of Artificial Sequence:  Enzymatic Nucleic Acid
  misc_feature (31)..(31): n stands for inosine
ucaucuuccugaugaggccguuaggccgaangcacauu

SEQ ID NO: 2839 - RNA, 38 nt, Artificial Sequence
  Description of Artificial Sequence:  Enzymatic Nucleic Acid
  misc_feature (31)..(31): n stands for inosine
ugaaugagcugaugaggccguuaggccgaanuuucauc

SEQ ID NO: 2840 - RNA, 38 nt, Artificial Sequence
  Description of Artificial Sequence:  Enzymatic Nucleic Acid
  misc_feature (31)..(31): n stands for inosine
guugaaugcugaugaggccguuaggccgaanuguuuca

SEQ ID NO: 2841 - RNA, 38 nt, Artificial Sequence
  Description of Artificial Sequence:  Enzymatic Nucleic Acid
  misc_feature (31)..(31): n stands for inosine
uuguugaacugaugaggccguuaggccgaanaguguuu

SEQ ID NO: 2842 - RNA, 38 nt, Artificial Sequence
  Description of Artificial Sequence:  Enzymatic Nucleic Acid
  misc_feature (31)..(31): n stands for inosine
uuauuugucugaugaggccguuaggccgaanaaugagu

SEQ ID NO: 2843 - RNA, 38 nt, Artificial Sequence
  Description of Artificial Sequence:  Enzymatic Nucleic Acid
  misc_feature (31)..(31): n stands for inosine
ccuuuauucugaugaggccguuaggccgaanuugaaug

SEQ ID NO: 2844 - RNA, 38 nt, Artificial Sequence
  Description of Artificial Sequence:  Enzymatic Nucleic Acid
  misc_feature (31)..(31): n stands for inosine
ggucaccacugaugaggccguuaggccgaanuccuuua

SEQ ID NO: 2845 - RNA, 38 nt, Artificial Sequence
  Description of Artificial Sequence:  Enzymatic Nucleic Acid
  misc_feature (31)..(31): n stands for inosine
gaugccugcugaugaggccguuaggccgaanucaccau

SEQ ID NO: 2846 - RNA, 38 nt, Artificial Sequence
  Description of Artificial Sequence:  Enzymatic Nucleic Acid
  misc_feature (31)..(31): n stands for inosine
agaugccucugaugaggccguuaggccgaangucacca

SEQ ID NO: 2847 - RNA, 38 nt, Artificial Sequence
  Description of Artificial Sequence:  Enzymatic Nucleic Acid
  misc_feature (31)..(31): n stands for inosine
gagaugcccugaugaggccguuaggccgaanggucacc

SEQ ID NO: 2848 - RNA, 38 nt, Artificial Sequence
  Description of Artificial Sequence:  Enzymatic Nucleic Acid
  misc_feature (31)..(31): n stands for inosine
uacagagacugaugaggccguuaggccgaanccugggu

SEQ ID NO: 2849 - RNA, 38 nt, Artificial Sequence
  Description of Artificial Sequence:  Enzymatic Nucleic Acid
  misc_feature (31)..(31): n stands for inosine
agauacagcugaugaggccguuaggccgaanaugccug

SEQ ID NO: 2850 - RNA, 38 nt, Artificial Sequence
  Description of Artificial Sequence:  Enzymatic Nucleic Acid
  misc_feature (31)..(31): n stands for inosine
acagauaccugaugaggccguuaggccgaanagaugcc

SEQ ID NO: 2851 - RNA, 38 nt, Artificial Sequence
  Description of Artificial Sequence:  Enzymatic Nucleic Acid
  misc_feature (31)..(31): n stands for inosine
cuucaaaccugaugaggccguuaggccgaanauacaga

SEQ ID NO: 2852 - RNA, 38 nt, Artificial Sequence
  Description of Artificial Sequence:  Enzymatic Nucleic Acid
  misc_feature (31)..(31): n stands for inosine
uuuccugucugaugaggccguuaggccgaancuucaaa

SEQ ID NO: 2853 - RNA, 38 nt, Artificial Sequence
  Description of Artificial Sequence:  Enzymatic Nucleic Acid
  misc_feature (31)..(31): n stands for inosine
cgcuuucccugaugaggccguuaggccgaanuagcuuc

SEQ ID NO: 2854 - RNA, 38 nt, Artificial Sequence
  Description of Artificial Sequence:  Enzymatic Nucleic Acid
  misc_feature (31)..(31): n stands for inosine
aacauuuucugaugaggccguuaggccgaanaaauaaa

SEQ ID NO: 2855 - RNA, 38 nt, Artificial Sequence
  Description of Artificial Sequence:  Enzymatic Nucleic Acid
  misc_feature (31)..(31): n stands for inosine
aucaaaaucugaugaggccguuaggccgaancaacauu

SEQ ID NO: 2856 - RNA, 38 nt, Artificial Sequence
  Description of Artificial Sequence:  Enzymatic Nucleic Acid
  misc_feature (31)..(31): n stands for inosine
aaucaaaacugaugaggccguuaggccgaangcaacau

SEQ ID NO: 2857 - RNA, 38 nt, Artificial Sequence
  Description of Artificial Sequence:  Enzymatic Nucleic Acid
  misc_feature (31)..(31): n stands for inosine
auguuucacugaugaggccguuaggccgaanaaucaaa

SEQ ID NO: 2858 - RNA, 38 nt, Artificial Sequence
  Description of Artificial Sequence:  Enzymatic Nucleic Acid
  misc_feature (31)..(31): n stands for inosine
cauguuuccugaugaggccguuaggccgaangaaucaa

SEQ ID NO: 2859 - RNA, 38 nt, Artificial Sequence
  Description of Artificial Sequence:  Enzymatic Nucleic Acid
  misc_feature (31)..(31): n stands for inosine
gucuuccacugaugaggccguuaggccgaanuuucagg

SEQ ID NO: 2860 - RNA, 38 nt, Artificial Sequence
  Description of Artificial Sequence:  Enzymatic Nucleic Acid
  misc_feature (31)..(31): n stands for inosine
ucagccuucugaugaggccguuaggccgaanucuucca

SEQ ID NO: 2861 - RNA, 38 nt, Artificial Sequence
  Description of Artificial Sequence:  Enzymatic Nucleic Acid
  misc_feature (31)..(31): n stands for inosine
acauaguccugaugaggccguuaggccgaanccuuugu

SEQ ID NO: 2862 - RNA, 38 nt, Artificial Sequence
  Description of Artificial Sequence:  Enzymatic Nucleic Acid
  misc_feature (31)..(31): n stands for inosine
ucucacaucugaugaggccguuaggccgaanucagccu

SEQ ID NO: 2863 - RNA, 38 nt, Artificial Sequence
  Description of Artificial Sequence:  Enzymatic Nucleic Acid
  misc_feature (31)..(31): n stands for inosine
caaguuuucugaugaggccguuaggccgaanucucaca

SEQ ID NO: 2864 - RNA, 38 nt, Artificial Sequence
  Description of Artificial Sequence:  Enzymatic Nucleic Acid
  misc_feature (31)..(31): n stands for inosine
ucaaguuucugaugaggccguuaggccgaangucucac

SEQ ID NO: 2865 - RNA, 38 nt, Artificial Sequence
  Description of Artificial Sequence:  Enzymatic Nucleic Acid
  misc_feature (31)..(31): n stands for inosine
aggucucacugaugaggccguuaggccgaanuuuuggu

SEQ ID NO: 2866 - RNA, 38 nt, Artificial Sequence
  Description of Artificial Sequence:  Enzymatic Nucleic Acid
  misc_feature (31)..(31): n stands for inosine
uuuuuguacugaugaggccguuaggccgaanucucaag

SEQ ID NO: 2867 - RNA, 38 nt, Artificial Sequence
  Description of Artificial Sequence:  Enzymatic Nucleic Acid
  misc_feature (31)..(31): n stands for inosine
auuuuugucugaugaggccguuaggccgaangucucaa

SEQ ID NO: 2868 - RNA, 38 nt, Artificial Sequence
  Description of Artificial Sequence:  Enzymatic Nucleic Acid
  misc_feature (31)..(31): n stands for inosine
agcauuuucugaugaggccguuaggccgaanuaggucu

SEQ ID NO: 2869 - RNA, 38 nt, Artificial Sequence
  Description of Artificial Sequence:  Enzymatic Nucleic Acid
  misc_feature (31)..(31): n stands for inosine
agaacauccugaugaggccguuaggccgaancauuuuu

SEQ ID NO: 2870 - RNA, 38 nt, Artificial Sequence
  Description of Artificial Sequence:  Enzymatic Nucleic Acid
  misc_feature (31)..(31): n stands for inosine
cagcaacccugaugaggccguuaggccgaanaacauca

SEQ ID NO: 2871 - RNA, 38 nt, Artificial Sequence
  Description of Artificial Sequence:  Enzymatic Nucleic Acid
  misc_feature (31)..(31): n stands for inosine
guagacuccugaugaggccguuaggccgaancaaccag

SEQ ID NO: 2872 - RNA, 38 nt, Artificial Sequence
  Description of Artificial Sequence:  Enzymatic Nucleic Acid
  misc_feature (31)..(31): n stands for inosine
ggaggagucugaugaggccguuaggccgaanacucagc

SEQ ID NO: 2873 - RNA, 38 nt, Artificial Sequence
  Description of Artificial Sequence:  Enzymatic Nucleic Acid
  misc_feature (31)..(31): n stands for inosine
ccuggaggcugaugaggccguuaggccgaanuagacuc

SEQ ID NO: 2874 - RNA, 38 nt, Artificial Sequence
  Description of Artificial Sequence:  Enzymatic Nucleic Acid
  misc_feature (31)..(31): n stands for inosine
uaccuggacugaugaggccguuaggccgaanaguagac

SEQ ID NO: 2875 - RNA, 38 nt, Artificial Sequence
  Description of Artificial Sequence:  Enzymatic Nucleic Acid
  misc_feature (31)..(31): n stands for inosine
uuaccuggcugaugaggccguuaggccgaangaguaga

SEQ ID NO: 2876 - RNA, 38 nt, Artificial Sequence
  Description of Artificial Sequence:  Enzymatic Nucleic Acid
  misc_feature (31)..(31): n stands for inosine
cauuaccucugaugaggccguuaggccgaanaggagua

SEQ ID NO: 2877 - RNA, 38 nt, Artificial Sequence
  Description of Artificial Sequence:  Enzymatic Nucleic Acid
  misc_feature (31)..(31): n stands for inosine
ucauuacccugaugaggccguuaggccgaangaggagu

SEQ ID NO: 2878 - RNA, 38 nt, Artificial Sequence
  Description of Artificial Sequence:  Enzymatic Nucleic Acid
  misc_feature (31)..(31): n stands for inosine
caguguagcugaugaggccguuaggccgaanuucauca

SEQ ID NO: 2879 - RNA, 38 nt, Artificial Sequence
  Description of Artificial Sequence:  Enzymatic Nucleic Acid
  misc_feature (31)..(31): n stands for inosine
ucaguguacugaugaggccguuaggccgaanguucauc

SEQ ID NO: 2880 - RNA, 38 nt, Artificial Sequence
  Description of Artificial Sequence:  Enzymatic Nucleic Acid
  misc_feature (31)..(31): n stands for inosine
cucagugucugaugaggccguuaggccgaangguucau

SEQ ID NO: 2881 - RNA, 38 nt, Artificial Sequence
  Description of Artificial Sequence:  Enzymatic Nucleic Acid
  misc_feature (31)..(31): n stands for inosine
cugcucagcugaugaggccguuaggccgaanuaggguu

SEQ ID NO: 2882 - RNA, 38 nt, Artificial Sequence
  Description of Artificial Sequence:  Enzymatic Nucleic Acid
  misc_feature (31)..(31): n stands for inosine
aucugcuccugaugaggccguuaggccgaanuguaggg

SEQ ID NO: 2883 - RNA, 38 nt, Artificial Sequence
  Description of Artificial Sequence:  Enzymatic Nucleic Acid
  misc_feature (31)..(31): n stands for inosine
ugcccauccugaugaggccguuaggccgaancucagug

SEQ ID NO: 2884 - RNA, 38 nt, Artificial Sequence
  Description of Artificial Sequence:  Enzymatic Nucleic Acid
  misc_feature (31)..(31): n stands for inosine
uccacagucugaugaggccguuaggccgaancccaucu

SEQ ID NO: 2885 - RNA, 38 nt, Artificial Sequence
  Description of Artificial Sequence:  Enzymatic Nucleic Acid
  misc_feature (31)..(31): n stands for inosine
cucuccaccugaugaggccguuaggccgaanuugccca

SEQ ID NO: 2886 - RNA, 38 nt, Artificial Sequence
  Description of Artificial Sequence:  Enzymatic Nucleic Acid
  misc_feature (31)..(31): n stands for inosine
agugaggucugaugaggccguuaggccgaanauccuuu

SEQ ID NO: 2887 - RNA, 38 nt, Artificial Sequence
  Description of Artificial Sequence:  Enzymatic Nucleic Acid
  misc_feature (31)..(31): n stands for inosine
gagugaggcugaugaggccguuaggccgaangauccuu

SEQ ID NO: 2888 - RNA, 38 nt, Artificial Sequence
  Description of Artificial Sequence:  Enzymatic Nucleic Acid
  misc_feature (31)..(31): n stands for inosine
aggagugacugaugaggccguuaggccgaanuggaucc

SEQ ID NO: 2889 - RNA, 38 nt, Artificial Sequence
  Description of Artificial Sequence:  Enzymatic Nucleic Acid
  misc_feature (31)..(31): n stands for inosine
caggagugcugaugaggccguuaggccgaanguggauc

SEQ ID NO: 2890 - RNA, 38 nt, Artificial Sequence
  Description of Artificial Sequence:  Enzymatic Nucleic Acid
  misc_feature (31)..(31): n stands for inosine
aucaggagcugaugaggccguuaggccgaanaggugga

SEQ ID NO: 2891 - RNA, 38 nt, Artificial Sequence
  Description of Artificial Sequence:  Enzymatic Nucleic Acid
  misc_feature (31)..(31): n stands for inosine
aaaucaggcugaugaggccguuaggccgaanugaggug

SEQ ID NO: 2892 - RNA, 38 nt, Artificial Sequence
  Description of Artificial Sequence:  Enzymatic Nucleic Acid
  misc_feature (31)..(31): n stands for inosine
ugaaaucacugaugaggccguuaggccgaanagugagg

SEQ ID NO: 2893 - RNA, 38 nt, Artificial Sequence
  Description of Artificial Sequence:  Enzymatic Nucleic Acid
  misc_feature (31)..(31): n stands for inosine
augaaauccugaugaggccguuaggccgaangagugag

SEQ ID NO: 2894 - RNA, 38 nt, Artificial Sequence
  Description of Artificial Sequence:  Enzymatic Nucleic Acid
  misc_feature (31)..(31): n stands for inosine
uccugcaacugaugaggccguuaggccgaanaaaucag

SEQ ID NO: 2895 - RNA, 38 nt, Artificial Sequence
  Description of Artificial Sequence:  Enzymatic Nucleic Acid
  misc_feature (31)..(31): n stands for inosine
uuuuuucccugaugaggccguuaggccgaancaaugaa

SEQ ID NO: 2896 - RNA, 38 nt, Artificial Sequence
  Description of Artificial Sequence:  Enzymatic Nucleic Acid
  misc_feature (31)..(31): n stands for inosine
ccauauuccugaugaggccguuaggccgaancuaacuu

SEQ ID NO: 2897 - RNA, 38 nt, Artificial Sequence
  Description of Artificial Sequence:  Enzymatic Nucleic Acid
  misc_feature (31)..(31): n stands for inosine
uaccuugucugaugaggccguuaggccgaanuccauau

SEQ ID NO: 2898 - RNA, 38 nt, Artificial Sequence
  Description of Artificial Sequence:  Enzymatic Nucleic Acid
  misc_feature (31)..(31): n stands for inosine
uuaccuugcugaugaggccguuaggccgaanguccaua

SEQ ID NO: 2899 - RNA, 38 nt, Artificial Sequence
  Description of Artificial Sequence:  Enzymatic Nucleic Acid
  misc_feature (31)..(31): n stands for inosine
ccuuaccucugaugaggccguuaggccgaanuggucca

SEQ ID NO: 2900 - RNA, 38 nt, Artificial Sequence
  Description of Artificial Sequence:  Enzymatic Nucleic Acid
  misc_feature (31)..(31): n stands for inosine
uggacaaacugaugaggccguuaggccgaanccuuacc

SEQ ID NO: 2901 - RNA, 38 nt, Artificial Sequence
  Description of Artificial Sequence:  Enzymatic Nucleic Acid
  misc_feature (31)..(31): n stands for inosine
ccacucaucugaugaggccguuaggccgaanacaaaug

SEQ ID NO: 2902 - RNA, 38 nt, Artificial Sequence
  Description of Artificial Sequence:  Enzymatic Nucleic Acid
  misc_feature (31)..(31): n stands for inosine
cccacucacugaugaggccguuaggccgaangacaaau

SEQ ID NO: 2903 - RNA, 38 nt, Artificial Sequence
  Description of Artificial Sequence:  Enzymatic Nucleic Acid
  misc_feature (31)..(31): n stands for inosine
cguagaugcugaugaggccguuaggccgaancccacuc

SEQ ID NO: 2904 - RNA, 38 nt, Artificial Sequence
  Description of Artificial Sequence:  Enzymatic Nucleic Acid
  misc_feature (31)..(31): n stands for inosine
aucguagacugaugaggccguuaggccgaanagcccac

SEQ ID NO: 2905 - RNA, 38 nt, Artificial Sequence
  Description of Artificial Sequence:  Enzymatic Nucleic Acid
  misc_feature (31)..(31): n stands for inosine
cccaucgucugaugaggccguuaggccgaanaugagcc

SEQ ID NO: 2906 - RNA, 38 nt, Artificial Sequence
  Description of Artificial Sequence:  Enzymatic Nucleic Acid
  misc_feature (31)..(31): n stands for inosine
aucauuaucugaugaggccguuaggccgaanuacucgu

SEQ ID NO: 2907 - RNA, 38 nt, Artificial Sequence
  Description of Artificial Sequence:  Enzymatic Nucleic Acid
  misc_feature (31)..(31): n stands for inosine
ggauaagucugaugaggccguuaggccgaanaauuucu

SEQ ID NO: 2908 - RNA, 38 nt, Artificial Sequence
  Description of Artificial Sequence:  Enzymatic Nucleic Acid
  misc_feature (31)..(31): n stands for inosine
auuggauacugaugaggccguuaggccgaanuagaauu

SEQ ID NO: 2909 - RNA, 38 nt, Artificial Sequence
  Description of Artificial Sequence:  Enzymatic Nucleic Acid
  misc_feature (31)..(31): n stands for inosine
cuuccauucugaugaggccguuaggccgaanauaagua

SEQ ID NO: 2910 - RNA, 38 nt, Artificial Sequence
  Description of Artificial Sequence:  Enzymatic Nucleic Acid
  misc_feature (31)..(31): n stands for inosine
ucuuccaucugaugaggccguuaggccgaangauaagu

SEQ ID NO: 2911 - RNA, 38 nt, Artificial Sequence
  Description of Artificial Sequence:  Enzymatic Nucleic Acid
  misc_feature (31)..(31): n stands for inosine
uuacugcucugaugaggccguuaggccgaanuauucuu

SEQ ID NO: 2912 - RNA, 38 nt, Artificial Sequence
  Description of Artificial Sequence:  Enzymatic Nucleic Acid
  misc_feature (31)..(31): n stands for inosine
caucuuaccugaugaggccguuaggccgaancuuguau

SEQ ID NO: 2913 - RNA, 38 nt, Artificial Sequence
  Description of Artificial Sequence:  Enzymatic Nucleic Acid
  misc_feature (31)..(31): n stands for inosine
auaccugccugaugaggccguuaggccgaanaacaucu

SEQ ID NO: 2914 - RNA, 38 nt, Artificial Sequence
  Description of Artificial Sequence:  Enzymatic Nucleic Acid
  misc_feature (31)..(31): n stands for inosine
guaauacccugaugaggccguuaggccgaancugaaca

SEQ ID NO: 2915 - RNA, 38 nt, Artificial Sequence
  Description of Artificial Sequence:  Enzymatic Nucleic Acid
  misc_feature (31)..(31): n stands for inosine
uuuguacccugaugaggccguuaggccgaanuaauacc

SEQ ID NO: 2916 - RNA, 38 nt, Artificial Sequence
  Description of Artificial Sequence:  Enzymatic Nucleic Acid
  misc_feature (31)..(31): n stands for inosine
acuacauucugaugaggccguuaggccgaanuaccagu

SEQ ID NO: 2917 - RNA, 38 nt, Artificial Sequence
  Description of Artificial Sequence:  Enzymatic Nucleic Acid
  misc_feature (31)..(31): n stands for inosine
ugccuccccugaugaggccguuaggccgaanacacuuc

SEQ ID NO: 2918 - RNA, 38 nt, Artificial Sequence
  Description of Artificial Sequence:  Enzymatic Nucleic Acid
  misc_feature (31)..(31): n stands for inosine
guaacagccugaugaggccguuaggccgaanccucccu

SEQ ID NO: 2919 - RNA, 38 nt, Artificial Sequence
  Description of Artificial Sequence:  Enzymatic Nucleic Acid
  misc_feature (31)..(31): n stands for inosine
gguguaaccugaugaggccguuaggccgaancugccuc

SEQ ID NO: 2920 - RNA, 38 nt, Artificial Sequence
  Description of Artificial Sequence:  Enzymatic Nucleic Acid
  misc_feature (31)..(31): n stands for inosine
ucuuuuggcugaugaggccguuaggccgaanuaacagc

SEQ ID NO: 2921 - RNA, 38 nt, Artificial Sequence
  Description of Artificial Sequence:  Enzymatic Nucleic Acid
  misc_feature (31)..(31): n stands for inosine
caucuuuucugaugaggccguuaggccgaanuguaaca

SEQ ID NO: 2922 - RNA, 38 nt, Artificial Sequence
  Description of Artificial Sequence:  Enzymatic Nucleic Acid
  misc_feature (31)..(31): n stands for inosine
gcaucuuucugaugaggccguuaggccgaanguguaac

SEQ ID NO: 2923 - RNA, 38 nt, Artificial Sequence
  Description of Artificial Sequence:  Enzymatic Nucleic Acid
  misc_feature (31)..(31): n stands for inosine
auugaaugcugaugaggccguuaggccgaancaucuuu

SEQ ID NO: 2924 - RNA, 38 nt, Artificial Sequence
  Description of Artificial Sequence:  Enzymatic Nucleic Acid
  misc_feature (31)..(31): n stands for inosine
uuauugaacugaugaggccguuaggccgaanugcaucu

SEQ ID NO: 2925 - RNA, 38 nt, Artificial Sequence
  Description of Artificial Sequence:  Enzymatic Nucleic Acid
  misc_feature (31)..(31): n stands for inosine
aacuuuaucugaugaggccguuaggccgaanaaugugc

SEQ ID NO: 2926 - RNA, 38 nt, Artificial Sequence
  Description of Artificial Sequence:  Enzymatic Nucleic Acid
  misc_feature (31)..(31): n stands for inosine
uagagucccugaugaggccguuaggccgaanuaacuuu

SEQ ID NO: 2927 - RNA, 38 nt, Artificial Sequence
  Description of Artificial Sequence:  Enzymatic Nucleic Acid
  misc_feature (31)..(31): n stands for inosine
uuucauagcugaugaggccguuaggccgaanuccugua

SEQ ID NO: 2928 - RNA, 38 nt, Artificial Sequence
  Description of Artificial Sequence:  Enzymatic Nucleic Acid
  misc_feature (31)..(31): n stands for inosine
uuuuucaucugaugaggccguuaggccgaanaguccug

SEQ ID NO: 2929 - RNA, 38 nt, Artificial Sequence
  Description of Artificial Sequence:  Enzymatic Nucleic Acid
  misc_feature (31)..(31): n stands for inosine
gggauuggcugaugaggccguuaggccgaanaacaaac

SEQ ID NO: 2930 - RNA, 38 nt, Artificial Sequence
  Description of Artificial Sequence:  Enzymatic Nucleic Acid
  misc_feature (31)..(31): n stands for inosine
gcgggauucugaugaggccguuaggccgaanagaacaa

SEQ ID NO: 2931 - RNA, 38 nt, Artificial Sequence
  Description of Artificial Sequence:  Enzymatic Nucleic Acid
  misc_feature (31)..(31): n stands for inosine
ggcgggaucugaugaggccguuaggccgaangagaaca

SEQ ID NO: 2932 - RNA, 38 nt, Artificial Sequence
  Description of Artificial Sequence:  Enzymatic Nucleic Acid
  misc_feature (31)..(31): n stands for inosine
gucuggcgcugaugaggccguuaggccgaanauuggag

SEQ ID NO: 2933 - RNA, 38 nt, Artificial Sequence
  Description of Artificial Sequence:  Enzymatic Nucleic Acid
  misc_feature (31)..(31): n stands for inosine
cgucuggccugaugaggccguuaggccgaangauugga

SEQ ID NO: 2934 - RNA, 38 nt, Artificial Sequence
  Description of Artificial Sequence:  Enzymatic Nucleic Acid
  misc_feature (31)..(31): n stands for inosine
cuccgucucugaugaggccguuaggccgaancgggauu

SEQ ID NO: 2935 - RNA, 38 nt, Artificial Sequence
  Description of Artificial Sequence:  Enzymatic Nucleic Acid
  misc_feature (31)..(31): n stands for inosine
ucuccguccugaugaggccguuaggccgaangcgggau

SEQ ID NO: 2936 - RNA, 38 nt, Artificial Sequence
  Description of Artificial Sequence:  Enzymatic Nucleic Acid
  misc_feature (31)..(31): n stands for inosine
auuauagacugaugaggccguuaggccgaanccuucuc

SEQ ID NO: 2937 - RNA, 38 nt, Artificial Sequence
  Description of Artificial Sequence:  Enzymatic Nucleic Acid
  misc_feature (31)..(31): n stands for inosine
aacauuaucugaugaggccguuaggccgaanaagccuu

SEQ ID NO: 2938 - RNA, 38 nt, Artificial Sequence
  Description of Artificial Sequence:  Enzymatic Nucleic Acid
  misc_feature (31)..(31): n stands for inosine
acauguugcugaugaggccguuaggccgaancaaacau

SEQ ID NO: 2939 - RNA, 38 nt, Artificial Sequence
  Description of Artificial Sequence:  Enzymatic Nucleic Acid
  misc_feature (31)..(31): n stands for inosine
caacaugucugaugaggccguuaggccgaanugcaaac

SEQ ID NO: 2940 - RNA, 38 nt, Artificial Sequence
  Description of Artificial Sequence:  Enzymatic Nucleic Acid
  misc_feature (31)..(31): n stands for inosine
aaucaacacugaugaggccguuaggccgaanuugugca

SEQ ID NO: 2941 - RNA, 38 nt, Artificial Sequence
  Description of Artificial Sequence:  Enzymatic Nucleic Acid
  misc_feature (31)..(31): n stands for inosine
ucaacuaucugaugaggccguuaggccgaanaaucaac

SEQ ID NO: 2942 - RNA, 38 nt, Artificial Sequence
  Description of Artificial Sequence:  Enzymatic Nucleic Acid
  misc_feature (31)..(31): n stands for inosine
uucuguaccugaugaggccguuaggccgaanaauucaa

SEQ ID NO: 2943 - RNA, 38 nt, Artificial Sequence
  Description of Artificial Sequence:  Enzymatic Nucleic Acid
  misc_feature (31)..(31): n stands for inosine
uuuuguuccugaugaggccguuaggccgaanuacagaa

SEQ ID NO: 2944 - RNA, 38 nt, Artificial Sequence
  Description of Artificial Sequence:  Enzymatic Nucleic Acid
  misc_feature (31)..(31): n stands for inosine
ugugguuucugaugaggccguuaggccgaanuucugua

SEQ ID NO: 2945 - RNA, 38 nt, Artificial Sequence
  Description of Artificial Sequence:  Enzymatic Nucleic Acid
  misc_feature (31)..(31): n stands for inosine
uuuguugucugaugaggccguuaggccgaanuuuuguu

SEQ ID NO: 2946 - RNA, 38 nt, Artificial Sequence
  Description of Artificial Sequence:  Enzymatic Nucleic Acid
  misc_feature (31)..(31): n stands for inosine
cuuuguugcugaugaggccguuaggccgaanguuuugu

SEQ ID NO: 2947 - RNA, 38 nt, Artificial Sequence
  Description of Artificial Sequence:  Enzymatic Nucleic Acid
  misc_feature (31)..(31): n stands for inosine
uucuuugucugaugaggccguuaggccgaanugguuuu

SEQ ID NO: 2948 - RNA, 38 nt, Artificial Sequence
  Description of Artificial Sequence:  Enzymatic Nucleic Acid
  misc_feature (31)..(31): n stands for inosine
agcuucuucugaugaggccguuaggccgaanuuguggu

SEQ ID NO: 2949 - RNA, 38 nt, Artificial Sequence
  Description of Artificial Sequence:  Enzymatic Nucleic Acid
  misc_feature (31)..(31): n stands for inosine
uuguuuggcugaugaggccguuaggccgaancuucuuu

SEQ ID NO: 2950 - RNA, 38 nt, Artificial Sequence
  Description of Artificial Sequence:  Enzymatic Nucleic Acid
  misc_feature (31)..(31): n stands for inosine
gcuuguuucugaugaggccguuaggccgaanagcuucu

SEQ ID NO: 2951 - RNA, 38 nt, Artificial Sequence
  Description of Artificial Sequence:  Enzymatic Nucleic Acid
  misc_feature (31)..(31): n stands for inosine
ugcuuguucugaugaggccguuaggccgaangagcuuc

SEQ ID NO: 2952 - RNA, 38 nt, Artificial Sequence
  Description of Artificial Sequence:  Enzymatic Nucleic Acid
  misc_feature (31)..(31): n stands for inosine
auuuugcucugaugaggccguuaggccgaanuuuggag

SEQ ID NO: 2953 - RNA, 38 nt, Artificial Sequence
  Description of Artificial Sequence:  Enzymatic Nucleic Acid
  misc_feature (31)..(31): n stands for inosine
uuugauuucugaugaggccguuaggccgaancuuguuu

SEQ ID NO: 2954 - RNA, 38 nt, Artificial Sequence
  Description of Artificial Sequence:  Enzymatic Nucleic Acid
  misc_feature (31)..(31): n stands for inosine
ugcauuuucugaugaggccguuaggccgaanauuuugc

SEQ ID NO: 2955 - RNA, 38 nt, Artificial Sequence
  Description of Artificial Sequence:  Enzymatic Nucleic Acid
  misc_feature (31)..(31): n stands for inosine
ucggagaucugaugaggccguuaggccgaancauuuuu

SEQ ID NO: 2956 - RNA, 38 nt, Artificial Sequence
  Description of Artificial Sequence:  Enzymatic Nucleic Acid
  misc_feature (31)..(31): n stands for inosine
ugcuucggcugaugaggccguuaggccgaanauugcau

SEQ ID NO: 2957 - RNA, 38 nt, Artificial Sequence
  Description of Artificial Sequence:  Enzymatic Nucleic Acid
  misc_feature (31)..(31): n stands for inosine
ugugcuuccugaugaggccguuaggccgaanagauugc

SEQ ID NO: 2958 - RNA, 38 nt, Artificial Sequence
  Description of Artificial Sequence:  Enzymatic Nucleic Acid
  misc_feature (31)..(31): n stands for inosine
uucccaugcugaugaggccguuaggccgaancuucgga

SEQ ID NO: 2959 - RNA, 38 nt, Artificial Sequence
  Description of Artificial Sequence:  Enzymatic Nucleic Acid
  misc_feature (31)..(31): n stands for inosine
acuucccacugaugaggccguuaggccgaanugcuucg

SEQ ID NO: 2960 - RNA, 38 nt, Artificial Sequence
  Description of Artificial Sequence:  Enzymatic Nucleic Acid
  misc_feature (31)..(31): n stands for inosine
agaaucaccugaugaggccguuaggccgaanaucacuu

SEQ ID NO: 2961 - RNA, 38 nt, Artificial Sequence
  Description of Artificial Sequence:  Enzymatic Nucleic Acid
  misc_feature (31)..(31): n stands for inosine
aaguccuccugaugaggccguuaggccgaanaaucacg

SEQ ID NO: 2962 - RNA, 38 nt, Artificial Sequence
  Description of Artificial Sequence:  Enzymatic Nucleic Acid
  misc_feature (31)..(31): n stands for inosine
uuucuuaacugaugaggccguuaggccgaanuccucag

SEQ ID NO: 2963 - RNA, 38 nt, Artificial Sequence
  Description of Artificial Sequence:  Enzymatic Nucleic Acid
  misc_feature (31)..(31): n stands for inosine
auaggagucugaugaggccguuaggccgaanuuuucuu

SEQ ID NO: 2964 - RNA, 38 nt, Artificial Sequence
  Description of Artificial Sequence:  Enzymatic Nucleic Acid
  misc_feature (31)..(31): n stands for inosine
cauaggagcugaugaggccguuaggccgaanguuuucu

SEQ ID NO: 2965 - RNA, 38 nt, Artificial Sequence
  Description of Artificial Sequence:  Enzymatic Nucleic Acid
  misc_feature (31)..(31): n stands for inosine
gucauaggcugaugaggccguuaggccgaanugguuuu

SEQ ID NO: 2966 - RNA, 38 nt, Artificial Sequence
  Description of Artificial Sequence:  Enzymatic Nucleic Acid
  misc_feature (31)..(31): n stands for inosine
uugucauacugaugaggccguuaggccgaanagugguu

SEQ ID NO: 2967 - RNA, 38 nt, Artificial Sequence
  Description of Artificial Sequence:  Enzymatic Nucleic Acid
  misc_feature (31)..(31): n stands for inosine
guugucaucugaugaggccguuaggccgaangaguggu

SEQ ID NO: 2968 - RNA, 38 nt, Artificial Sequence
  Description of Artificial Sequence:  Enzymatic Nucleic Acid
  misc_feature (31)..(31): n stands for inosine
ggcugugucugaugaggccguuaggccgaanucauagg

SEQ ID NO: 2969 - RNA, 38 nt, Artificial Sequence
  Description of Artificial Sequence:  Enzymatic Nucleic Acid
  misc_feature (31)..(31): n stands for inosine
gguggcugcugaugaggccguuaggccgaanuugucau

SEQ ID NO: 2970 - RNA, 38 nt, Artificial Sequence
  Description of Artificial Sequence:  Enzymatic Nucleic Acid
  misc_feature (31)..(31): n stands for inosine
uugguggccugaugaggccguuaggccgaanuguuguc

SEQ ID NO: 2971 - RNA, 38 nt, Artificial Sequence
  Description of Artificial Sequence:  Enzymatic Nucleic Acid
  misc_feature (31)..(31): n stands for inosine
gauuuggucugaugaggccguuaggccgaancuguguu

SEQ ID NO: 2972 - RNA, 38 nt, Artificial Sequence
  Description of Artificial Sequence:  Enzymatic Nucleic Acid
  misc_feature (31)..(31): n stands for inosine
ggauuuggcugaugaggccguuaggccgaangcugugu

SEQ ID NO: 2973 - RNA, 38 nt, Artificial Sequence
  Description of Artificial Sequence:  Enzymatic Nucleic Acid
  misc_feature (31)..(31): n stands for inosine
ugggauuucugaugaggccguuaggccgaanuggcugu

SEQ ID NO: 2974 - RNA, 38 nt, Artificial Sequence
  Description of Artificial Sequence:  Enzymatic Nucleic Acid
  misc_feature (31)..(31): n stands for inosine
gugggauucugaugaggccguuaggccgaanguggcug

SEQ ID NO: 2975 - RNA, 38 nt, Artificial Sequence
  Description of Artificial Sequence:  Enzymatic Nucleic Acid
  misc_feature (31)..(31): n stands for inosine
agaaggugcugaugaggccguuaggccgaanauuuggu

SEQ ID NO: 2976 - RNA, 38 nt, Artificial Sequence
  Description of Artificial Sequence:  Enzymatic Nucleic Acid
  misc_feature (31)..(31): n stands for inosine
gagaaggucugaugaggccguuaggccgaangauuugg

SEQ ID NO: 2977 - RNA, 38 nt, Artificial Sequence
  Description of Artificial Sequence:  Enzymatic Nucleic Acid
  misc_feature (31)..(31): n stands for inosine
ugagaaggcugaugaggccguuaggccgaanggauuug

SEQ ID NO: 2978 - RNA, 38 nt, Artificial Sequence
  Description of Artificial Sequence:  Enzymatic Nucleic Acid
  misc_feature (31)..(31): n stands for inosine
aaugagaacugaugaggccguuaggccgaanugggauu

SEQ ID NO: 2979 - RNA, 38 nt, Artificial Sequence
  Description of Artificial Sequence:  Enzymatic Nucleic Acid
  misc_feature (31)..(31): n stands for inosine
caaugagacugaugaggccguuaggccgaangugggau

SEQ ID NO: 2980 - RNA, 38 nt, Artificial Sequence
  Description of Artificial Sequence:  Enzymatic Nucleic Acid
  misc_feature (31)..(31): n stands for inosine
cagcaaugcugaugaggccguuaggccgaanaaggugg

SEQ ID NO: 2981 - RNA, 38 nt, Artificial Sequence
  Description of Artificial Sequence:  Enzymatic Nucleic Acid
  misc_feature (31)..(31): n stands for inosine
ugcagcaacugaugaggccguuaggccgaanagaaggu

SEQ ID NO: 2982 - RNA, 38 nt, Artificial Sequence
  Description of Artificial Sequence:  Enzymatic Nucleic Acid
  misc_feature (31)..(31): n stands for inosine
caaucugccugaugaggccguuaggccgaancaaugag

SEQ ID NO: 2983 - RNA, 38 nt, Artificial Sequence
  Description of Artificial Sequence:  Enzymatic Nucleic Acid
  misc_feature (31)..(31): n stands for inosine
guccaauccugaugaggccguuaggccgaancagcaau

SEQ ID NO: 2984 - RNA, 38 nt, Artificial Sequence
  Description of Artificial Sequence:  Enzymatic Nucleic Acid
  misc_feature (31)..(31): n stands for inosine
caauucuucugaugaggccguuaggccgaanuccaauc

SEQ ID NO: 2985 - RNA, 38 nt, Artificial Sequence
  Description of Artificial Sequence:  Enzymatic Nucleic Acid
  misc_feature (31)..(31): n stands for inosine
uuugucaacugaugaggccguuaggccgaanacuaaac

SEQ ID NO: 2986 - RNA, 38 nt, Artificial Sequence
  Description of Artificial Sequence:  Enzymatic Nucleic Acid
  misc_feature (31)..(31): n stands for inosine
auuugucacugaugaggccguuaggccgaangacuaaa

SEQ ID NO: 2987 - RNA, 38 nt, Artificial Sequence
  Description of Artificial Sequence:  Enzymatic Nucleic Acid
  misc_feature (31)..(31): n stands for inosine
uccagauucugaugaggccguuaggccgaanucaagga

SEQ ID NO: 2988 - RNA, 38 nt, Artificial Sequence
  Description of Artificial Sequence:  Enzymatic Nucleic Acid
  misc_feature (31)..(31): n stands for inosine
augcuucccugaugaggccguuaggccgaanauuuguc

SEQ ID NO: 2989 - RNA, 38 nt, Artificial Sequence
  Description of Artificial Sequence:  Enzymatic Nucleic Acid
  misc_feature (31)..(31): n stands for inosine
agucgccacugaugaggccguuaggccgaancuuccag

SEQ ID NO: 2990 - RNA, 38 nt, Artificial Sequence
  Description of Artificial Sequence:  Enzymatic Nucleic Acid
  misc_feature (31)..(31): n stands for inosine
cgguuacccugaugaggccguuaggccgaanucgccau

SEQ ID NO: 2991 - RNA, 38 nt, Artificial Sequence
  Description of Artificial Sequence:  Enzymatic Nucleic Acid
  misc_feature (31)..(31): n stands for inosine
auugaggccugaugaggccguuaggccgaanuuaccag

SEQ ID NO: 2992 - RNA, 38 nt, Artificial Sequence
  Description of Artificial Sequence:  Enzymatic Nucleic Acid
  misc_feature (31)..(31): n stands for inosine
ucgauugacugaugaggccguuaggccgaancgguuac

SEQ ID NO: 2993 - RNA, 38 nt, Artificial Sequence
  Description of Artificial Sequence:  Enzymatic Nucleic Acid
  misc_feature (31)..(31): n stands for inosine
gucgauugcugaugaggccguuaggccgaangcgguua

SEQ ID NO: 2994 - RNA, 38 nt, Artificial Sequence
  Description of Artificial Sequence:  Enzymatic Nucleic Acid
  misc_feature (31)..(31): n stands for inosine
cagucgaucugaugaggccguuaggccgaanaggcggu

SEQ ID NO: 2995 - RNA, 38 nt, Artificial Sequence
  Description of Artificial Sequence:  Enzymatic Nucleic Acid
  misc_feature (31)..(31): n stands for inosine
cuugauuccugaugaggccguuaggccgaanucgauug

SEQ ID NO: 2996 - RNA, 38 nt, Artificial Sequence
  Description of Artificial Sequence:  Enzymatic Nucleic Acid
  misc_feature (31)..(31): n stands for inosine
ggccugcucugaugaggccguuaggccgaanauucagu

SEQ ID NO: 2997 - RNA, 38 nt, Artificial Sequence
  Description of Artificial Sequence:  Enzymatic Nucleic Acid
  misc_feature (31)..(31): n stands for inosine
agcuggcccugaugaggccguuaggccgaancuugauu

SEQ ID NO: 2998 - RNA, 38 nt, Artificial Sequence
  Description of Artificial Sequence:  Enzymatic Nucleic Acid
  misc_feature (31)..(31): n stands for inosine
gaaaagcucugaugaggccguuaggccgaanccugcuu

SEQ ID NO: 2999 - RNA, 38 nt, Artificial Sequence
  Description of Artificial Sequence:  Enzymatic Nucleic Acid
  misc_feature (31)..(31): n stands for inosine
ggaaaagccugaugaggccguuaggccgaangccugcu

SEQ ID NO: 3000 - RNA, 38 nt, Artificial Sequence
  Description of Artificial Sequence:  Enzymatic Nucleic Acid
  misc_feature (31)..(31): n stands for inosine
gcaggaaacugaugaggccguuaggccgaancuggccu

SEQ ID NO: 3001 - RNA, 38 nt, Artificial Sequence
  Description of Artificial Sequence:  Enzymatic Nucleic Acid
  misc_feature (31)..(31): n stands for inosine
cugcagcacugaugaggccguuaggccgaanaaaagcu

SEQ ID NO: 3002 - RNA, 38 nt, Artificial Sequence
  Description of Artificial Sequence:  Enzymatic Nucleic Acid
  misc_feature (31)..(31): n stands for inosine
ucugcagccugaugaggccguuaggccgaangaaaagc

SEQ ID NO: 3003 - RNA, 38 nt, Artificial Sequence
  Description of Artificial Sequence:  Enzymatic Nucleic Acid
  misc_feature (31)..(31): n stands for inosine
cugucugccugaugaggccguuaggccgaancaggaaa

SEQ ID NO: 3004 - RNA, 38 nt, Artificial Sequence
  Description of Artificial Sequence:  Enzymatic Nucleic Acid
  misc_feature (31)..(31): n stands for inosine
caacuguccugaugaggccguuaggccgaancagcagg

SEQ ID NO: 3005 - RNA, 38 nt, Artificial Sequence
  Description of Artificial Sequence:  Enzymatic Nucleic Acid
  misc_feature (31)..(31): n stands for inosine
agcucaaccugaugaggccguuaggccgaanucugcag

SEQ ID NO: 3006 - RNA, 38 nt, Artificial Sequence
  Description of Artificial Sequence:  Enzymatic Nucleic Acid
  misc_feature (31)..(31): n stands for inosine
aggacccccugaugaggccguuaggccgaancucaacu

SEQ ID NO: 3007 - RNA, 38 nt, Artificial Sequence
  Description of Artificial Sequence:  Enzymatic Nucleic Acid
  misc_feature (31)..(31): n stands for inosine
ccaacccacugaugaggccguuaggccgaanaccccag

SEQ ID NO: 3008 - RNA, 38 nt, Artificial Sequence
  Description of Artificial Sequence:  Enzymatic Nucleic Acid
  misc_feature (31)..(31): n stands for inosine
cccaaccccugaugaggccguuaggccgaangacccca

SEQ ID NO: 3009 - RNA, 38 nt, Artificial Sequence
  Description of Artificial Sequence:  Enzymatic Nucleic Acid
  misc_feature (31)..(31): n stands for inosine
cugucaaacugaugaggccguuaggccgaanucaccau

SEQ ID NO: 3010 - RNA, 38 nt, Artificial Sequence
  Description of Artificial Sequence:  Enzymatic Nucleic Acid
  misc_feature (31)..(31): n stands for inosine
ggcagcaccugaugaggccguuaggccgaanucaaaug

SEQ ID NO: 3011 - RNA, 38 nt, Artificial Sequence
  Description of Artificial Sequence:  Enzymatic Nucleic Acid
  misc_feature (31)..(31): n stands for inosine
acaugggccugaugaggccguuaggccgaancacuguc

SEQ ID NO: 3012 - RNA, 38 nt, Artificial Sequence
  Description of Artificial Sequence:  Enzymatic Nucleic Acid
  misc_feature (31)..(31): n stands for inosine
uguacaugcugaugaggccguuaggccgaancagcacu

SEQ ID NO: 3013 - RNA, 38 nt, Artificial Sequence
  Description of Artificial Sequence:  Enzymatic Nucleic Acid
  misc_feature (31)..(31): n stands for inosine
uuguacaucugaugaggccguuaggccgaangcagcac

SEQ ID NO: 3014 - RNA, 38 nt, Artificial Sequence
  Description of Artificial Sequence:  Enzymatic Nucleic Acid
  misc_feature (31)..(31): n stands for inosine
uuuguacacugaugaggccguuaggccgaanggcagca

SEQ ID NO: 3015 - RNA, 38 nt, Artificial Sequence
  Description of Artificial Sequence:  Enzymatic Nucleic Acid
  misc_feature (31)..(31): n stands for inosine
guucacuucugaugaggccguuaggccgaanuacaugg

SEQ ID NO: 3016 - RNA, 38 nt, Artificial Sequence
  Description of Artificial Sequence:  Enzymatic Nucleic Acid
  misc_feature (31)..(31): n stands for inosine
ucuguaugcugaugaggccguuaggccgaanuucacuu

SEQ ID NO: 3017 - RNA, 38 nt, Artificial Sequence
  Description of Artificial Sequence:  Enzymatic Nucleic Acid
  misc_feature (31)..(31): n stands for inosine
uaucuguacugaugaggccguuaggccgaanaguucac

SEQ ID NO: 3018 - RNA, 38 nt, Artificial Sequence
  Description of Artificial Sequence:  Enzymatic Nucleic Acid
  misc_feature (31)..(31): n stands for inosine
uguuuauccugaugaggccguuaggccgaanuaugagu

SEQ ID NO: 3019 - RNA, 38 nt, Artificial Sequence
  Description of Artificial Sequence:  Enzymatic Nucleic Acid
  misc_feature (31)..(31): n stands for inosine
acugccaccugaugaggccguuaggccgaanuuuaucu

SEQ ID NO: 3020 - RNA, 38 nt, Artificial Sequence
  Description of Artificial Sequence:  Enzymatic Nucleic Acid
  misc_feature (31)..(31): n stands for inosine
ccugucaccugaugaggccguuaggccgaanccacugu

SEQ ID NO: 3021 - RNA, 38 nt, Artificial Sequence
  Description of Artificial Sequence:  Enzymatic Nucleic Acid
  misc_feature (31)..(31): n stands for inosine
uguguccccugaugaggccguuaggccgaanucacugc

SEQ ID NO: 3022 - RNA, 38 nt, Artificial Sequence
  Description of Artificial Sequence:  Enzymatic Nucleic Acid
  misc_feature (31)..(31): n stands for inosine
ggcgagugcugaugaggccguuaggccgaanucccugu

SEQ ID NO: 3023 - RNA, 38 nt, Artificial Sequence
  Description of Artificial Sequence:  Enzymatic Nucleic Acid
  misc_feature (31)..(31): n stands for inosine
uuggcgagcugaugaggccguuaggccgaanugucccu

SEQ ID NO: 3024 - RNA, 38 nt, Artificial Sequence
  Description of Artificial Sequence:  Enzymatic Nucleic Acid
  misc_feature (31)..(31): n stands for inosine
uuuuggcgcugaugaggccguuaggccgaanugugucc

SEQ ID NO: 3025 - RNA, 38 nt, Artificial Sequence
  Description of Artificial Sequence:  Enzymatic Nucleic Acid
  misc_feature (31)..(31): n stands for inosine
aaucuuuucugaugaggccguuaggccgaancgagugu

SEQ ID NO: 3026 - RNA, 38 nt, Artificial Sequence
  Description of Artificial Sequence:  Enzymatic Nucleic Acid
  misc_feature (31)..(31): n stands for inosine
uaaucuuucugaugaggccguuaggccgaangcgagug

SEQ ID NO: 3027 - RNA, 38 nt, Artificial Sequence
  Description of Artificial Sequence:  Enzymatic Nucleic Acid
  misc_feature (31)..(31): n stands for inosine
cugcugcacugaugaggccguuaggccgaanuaaucuu

SEQ ID NO: 3028 - RNA, 38 nt, Artificial Sequence
  Description of Artificial Sequence:  Enzymatic Nucleic Acid
  misc_feature (31)..(31): n stands for inosine
gcugcugccugaugaggccguuaggccgaanguaaucu

SEQ ID NO: 3029 - RNA, 38 nt, Artificial Sequence
  Description of Artificial Sequence:  Enzymatic Nucleic Acid
  misc_feature (31)..(31): n stands for inosine
gaagcugccugaugaggccguuaggccgaancagguaa

SEQ ID NO: 3030 - RNA, 38 nt, Artificial Sequence
  Description of Artificial Sequence:  Enzymatic Nucleic Acid
  misc_feature (31)..(31): n stands for inosine
ccugaagccugaugaggccguuaggccgaancugcagg

SEQ ID NO: 3031 - RNA, 38 nt, Artificial Sequence
  Description of Artificial Sequence:  Enzymatic Nucleic Acid
  misc_feature (31)..(31): n stands for inosine
ccuccugacugaugaggccguuaggccgaancugcugc

SEQ ID NO: 3032 - RNA, 38 nt, Artificial Sequence
  Description of Artificial Sequence:  Enzymatic Nucleic Acid
  misc_feature (31)..(31): n stands for inosine
gucccucccugaugaggccguuaggccgaanaagcugc

SEQ ID NO: 3033 - RNA, 38 nt, Artificial Sequence
  Description of Artificial Sequence:  Enzymatic Nucleic Acid
  misc_feature (31)..(31): n stands for inosine
cugcagaucugaugaggccguuaggccgaanacguccc

SEQ ID NO: 3034 - RNA, 38 nt, Artificial Sequence
  Description of Artificial Sequence:  Enzymatic Nucleic Acid
  misc_feature (31)..(31): n stands for inosine
gcugcagacugaugaggccguuaggccgaangacgucc

SEQ ID NO: 3035 - RNA, 38 nt, Artificial Sequence
  Description of Artificial Sequence:  Enzymatic Nucleic Acid
  misc_feature (31)..(31): n stands for inosine
cccgcugccugaugaggccguuaggccgaanauggacg

SEQ ID NO: 3036 - RNA, 38 nt, Artificial Sequence
  Description of Artificial Sequence:  Enzymatic Nucleic Acid
  misc_feature (31)..(31): n stands for inosine
aagcccgccugaugaggccguuaggccgaancagaugg

SEQ ID NO: 3037 - RNA, 38 nt, Artificial Sequence
  Description of Artificial Sequence:  Enzymatic Nucleic Acid
  misc_feature (31)..(31): n stands for inosine
ccgaucgacugaugaggccguuaggccgaancccgcug

SEQ ID NO: 3038 - RNA, 38 nt, Artificial Sequence
  Description of Artificial Sequence:  Enzymatic Nucleic Acid
  misc_feature (31)..(31): n stands for inosine
acaguaaacugaugaggccguuaggccgaanccgaucg

SEQ ID NO: 3039 - RNA, 38 nt, Artificial Sequence
  Description of Artificial Sequence:  Enzymatic Nucleic Acid
  misc_feature (31)..(31): n stands for inosine
cuaaucaccugaugaggccguuaggccgaanuaaaugc

SEQ ID NO: 3040 - RNA, 38 nt, Artificial Sequence
  Description of Artificial Sequence:  Enzymatic Nucleic Acid
  misc_feature (31)..(31): n stands for inosine
caucaguucugaugaggccguuaggccgaanauauuuc

SEQ ID NO: 3041 - RNA, 38 nt, Artificial Sequence
  Description of Artificial Sequence:  Enzymatic Nucleic Acid
  misc_feature (31)..(31): n stands for inosine
ccaucagucugaugaggccguuaggccgaangauauuu

SEQ ID NO: 3042 - RNA, 38 nt, Artificial Sequence
  Description of Artificial Sequence:  Enzymatic Nucleic Acid
  misc_feature (31)..(31): n stands for inosine
gauccauccugaugaggccguuaggccgaanuuggaua

SEQ ID NO: 3043 - RNA, 38 nt, Artificial Sequence
  Description of Artificial Sequence:  Enzymatic Nucleic Acid
  misc_feature (31)..(31): n stands for inosine
acaauuuccugaugaggccguuaggccgaanauccauc

SEQ ID NO: 3044 - RNA, 38 nt, Artificial Sequence
  Description of Artificial Sequence:  Enzymatic Nucleic Acid
  misc_feature (31)..(31): n stands for inosine
ccgucagccugaugaggccguuaggccgaancacaauu

SEQ ID NO: 3045 - RNA, 38 nt, Artificial Sequence
  Description of Artificial Sequence:  Enzymatic Nucleic Acid
  misc_feature (31)..(31): n stands for inosine
cauccguccugaugaggccguuaggccgaancagcaca

SEQ ID NO: 3046 - RNA, 38 nt, Artificial Sequence
  Description of Artificial Sequence:  Enzymatic Nucleic Acid
  misc_feature (31)..(31): n stands for inosine
uauagugucugaugaggccguuaggccgaanucuuccc

SEQ ID NO: 3047 - RNA, 38 nt, Artificial Sequence
  Description of Artificial Sequence:  Enzymatic Nucleic Acid
  misc_feature (31)..(31): n stands for inosine
acuuauagcugaugaggccguuaggccgaanuugucuu

SEQ ID NO: 3048 - RNA, 38 nt, Artificial Sequence
  Description of Artificial Sequence:  Enzymatic Nucleic Acid
  misc_feature (31)..(31): n stands for inosine
ccacuuaucugaugaggccguuaggccgaanuguuguc

SEQ ID NO: 3049 - RNA, 38 nt, Artificial Sequence
  Description of Artificial Sequence:  Enzymatic Nucleic Acid
  misc_feature (31)..(31): n stands for inosine
cucguuaacugaugaggccguuaggccgaancacccac

SEQ ID NO: 3050 - RNA, 38 nt, Artificial Sequence
  Description of Artificial Sequence:  Enzymatic Nucleic Acid
  misc_feature (31)..(31): n stands for inosine
acuuuguucugaugaggccguuaggccgaanaccucgu

SEQ ID NO: 3051 - RNA, 38 nt, Artificial Sequence
  Description of Artificial Sequence:  Enzymatic Nucleic Acid
  misc_feature (31)..(31): n stands for inosine
caccacuucugaugaggccguuaggccgaanuuugacc

SEQ ID NO: 3052 - RNA, 38 nt, Artificial Sequence
  Description of Artificial Sequence:  Enzymatic Nucleic Acid
  misc_feature (31)..(31): n stands for inosine
uggaugaucugaugaggccguuaggccgaancaccacu

SEQ ID NO: 3053 - RNA, 38 nt, Artificial Sequence
  Description of Artificial Sequence:  Enzymatic Nucleic Acid
  misc_feature (31)..(31): n stands for inosine
guggaugacugaugaggccguuaggccgaangcaccac

SEQ ID NO: 3054 - RNA, 38 nt, Artificial Sequence
  Description of Artificial Sequence:  Enzymatic Nucleic Acid
  misc_feature (31)..(31): n stands for inosine
uguguggacugaugaggccguuaggccgaanauggcac

SEQ ID NO: 3055 - RNA, 38 nt, Artificial Sequence
  Description of Artificial Sequence:  Enzymatic Nucleic Acid
  misc_feature (31)..(31): n stands for inosine
gacugugucugaugaggccguuaggccgaanaugaugg

SEQ ID NO: 3056 - RNA, 38 nt, Artificial Sequence
  Description of Artificial Sequence:  Enzymatic Nucleic Acid
  misc_feature (31)..(31): n stands for inosine
cgacugugcugaugaggccguuaggccgaangaugaug

SEQ ID NO: 3057 - RNA, 38 nt, Artificial Sequence
  Description of Artificial Sequence:  Enzymatic Nucleic Acid
  misc_feature (31)..(31): n stands for inosine
agcgacugcugaugaggccguuaggccgaanuggauga

SEQ ID NO: 3058 - RNA, 38 nt, Artificial Sequence
  Description of Artificial Sequence:  Enzymatic Nucleic Acid
  misc_feature (31)..(31): n stands for inosine
aaagcgaccugaugaggccguuaggccgaanuguggau

SEQ ID NO: 3059 - RNA, 38 nt, Artificial Sequence
  Description of Artificial Sequence:  Enzymatic Nucleic Acid
  misc_feature (31)..(31): n stands for inosine
ggccccaacugaugaggccguuaggccgaancgacugu

SEQ ID NO: 3060 - RNA, 38 nt, Artificial Sequence
  Description of Artificial Sequence:  Enzymatic Nucleic Acid
  misc_feature (31)..(31): n stands for inosine
cugcagagcugaugaggccguuaggccgaanccccaaa

SEQ ID NO: 3061 - RNA, 38 nt, Artificial Sequence
  Description of Artificial Sequence:  Enzymatic Nucleic Acid
  misc_feature (31)..(31): n stands for inosine
gcugcagacugaugaggccguuaggccgaangccccaa

SEQ ID NO: 3062 - RNA, 38 nt, Artificial Sequence
  Description of Artificial Sequence:  Enzymatic Nucleic Acid
  misc_feature (31)..(31): n stands for inosine
agcugcagcugaugaggccguuaggccgaanggcccca

SEQ ID NO: 3063 - RNA, 38 nt, Artificial Sequence
  Description of Artificial Sequence:  Enzymatic Nucleic Acid
  misc_feature (31)..(31): n stands for inosine
ugagcugccugaugaggccguuaggccgaanagggccc

SEQ ID NO: 3064 - RNA, 38 nt, Artificial Sequence
  Description of Artificial Sequence:  Enzymatic Nucleic Acid
  misc_feature (31)..(31): n stands for inosine
ucuugagccugaugaggccguuaggccgaancagaggg

SEQ ID NO: 3065 - RNA, 38 nt, Artificial Sequence
  Description of Artificial Sequence:  Enzymatic Nucleic Acid
  misc_feature (31)..(31): n stands for inosine
aguucuugcugaugaggccguuaggccgaancugcaga

SEQ ID NO: 3066 - RNA, 38 nt, Artificial Sequence
  Description of Artificial Sequence:  Enzymatic Nucleic Acid
  misc_feature (31)..(31): n stands for inosine
cuaguucucugaugaggccguuaggccgaanagcugca

SEQ ID NO: 3067 - RNA, 38 nt, Artificial Sequence
  Description of Artificial Sequence:  Enzymatic Nucleic Acid
  misc_feature (31)..(31): n stands for inosine
gcuccucucugaugaggccguuaggccgaanuucuuga

SEQ ID NO: 3068 - RNA, 38 nt, Artificial Sequence
  Description of Artificial Sequence:  Enzymatic Nucleic Acid
  misc_feature (31)..(31): n stands for inosine
uuuuggaccugaugaggccguuaggccgaancuccucu

SEQ ID NO: 3069 - RNA, 38 nt, Artificial Sequence
  Description of Artificial Sequence:  Enzymatic Nucleic Acid
  misc_feature (31)..(31): n stands for inosine
gucauuuucugaugaggccguuaggccgaanacagcuc

SEQ ID NO: 3070 - RNA, 38 nt, Artificial Sequence
  Description of Artificial Sequence:  Enzymatic Nucleic Acid
  misc_feature (31)..(31): n stands for inosine
ugucauuucugaugaggccguuaggccgaangacagcu

SEQ ID NO: 3071 - RNA, 38 nt, Artificial Sequence
  Description of Artificial Sequence:  Enzymatic Nucleic Acid
  misc_feature (31)..(31): n stands for inosine
aaaccucccugaugaggccguuaggccgaanucauuuu

SEQ ID NO: 3072 - RNA, 38 nt, Artificial Sequence
  Description of Artificial Sequence:  Enzymatic Nucleic Acid
  misc_feature (31)..(31): n stands for inosine
cauauguccugaugaggccguuaggccgaanuaaaccu

SEQ ID NO: 3073 - RNA, 38 nt, Artificial Sequence
  Description of Artificial Sequence:  Enzymatic Nucleic Acid
  misc_feature (31)..(31): n stands for inosine
gaagcauacugaugaggccguuaggccgaanucuguaa

SEQ ID NO: 3074 - RNA, 38 nt, Artificial Sequence
  Description of Artificial Sequence:  Enzymatic Nucleic Acid
  misc_feature (31)..(31): n stands for inosine
ugaucugacugaugaggccguuaggccgaancauaugu

SEQ ID NO: 3075 - RNA, 38 nt, Artificial Sequence
  Description of Artificial Sequence:  Enzymatic Nucleic Acid
  misc_feature (31)..(31): n stands for inosine
acuugauccugaugaggccguuaggccgaanaagcaua

SEQ ID NO: 3076 - RNA, 38 nt, Artificial Sequence
  Description of Artificial Sequence:  Enzymatic Nucleic Acid
  misc_feature (31)..(31): n stands for inosine
ucugaacucugaugaggccguuaggccgaanaucugaa

SEQ ID NO: 3077 - RNA, 38 nt, Artificial Sequence
  Description of Artificial Sequence:  Enzymatic Nucleic Acid
  misc_feature (31)..(31): n stands for inosine
cauuguuccugaugaggccguuaggccgaanaacuuga

SEQ ID NO: 3078 - RNA, 38 nt, Artificial Sequence
  Description of Artificial Sequence:  Enzymatic Nucleic Acid
  misc_feature (31)..(31): n stands for inosine
gaggccaucugaugaggccguuaggccgaanuucugaa

SEQ ID NO: 3079 - RNA, 38 nt, Artificial Sequence
  Description of Artificial Sequence:  Enzymatic Nucleic Acid
  misc_feature (31)..(31): n stands for inosine
aucaaugacugaugaggccguuaggccgaanccauugu

SEQ ID NO: 3080 - RNA, 38 nt, Artificial Sequence
  Description of Artificial Sequence:  Enzymatic Nucleic Acid
  misc_feature (31)..(31): n stands for inosine
caucaaugcugaugaggccguuaggccgaangccauug

SEQ ID NO: 3081 - RNA, 38 nt, Artificial Sequence
  Description of Artificial Sequence:  Enzymatic Nucleic Acid
  misc_feature (31)..(31): n stands for inosine
agcaucaacugaugaggccguuaggccgaanaggccau

SEQ ID NO: 3082 - RNA, 38 nt, Artificial Sequence
  Description of Artificial Sequence:  Enzymatic Nucleic Acid
  misc_feature (31)..(31): n stands for inosine
gccccaaacugaugaggccguuaggccgaancaucaau

SEQ ID NO: 3083 - RNA, 38 nt, Artificial Sequence
  Description of Artificial Sequence:  Enzymatic Nucleic Acid
  misc_feature (31)..(31): n stands for inosine
gaugaaagcugaugaggccguuaggccgaanccccaaa

SEQ ID NO: 3084 - RNA, 38 nt, Artificial Sequence
  Description of Artificial Sequence:  Enzymatic Nucleic Acid
  misc_feature (31)..(31): n stands for inosine
ugaugaaacugaugaggccguuaggccgaangccccaa

SEQ ID NO: 3085 - RNA, 38 nt, Artificial Sequence
  Description of Artificial Sequence:  Enzymatic Nucleic Acid
  misc_feature (31)..(31): n stands for inosine
cugaugaacugaugaggccguuaggccgaanggcccca

SEQ ID NO: 3086 - RNA, 38 nt, Artificial Sequence
  Description of Artificial Sequence:  Enzymatic Nucleic Acid
  misc_feature (31)..(31): n stands for inosine
uuuccugacugaugaggccguuaggccgaanaaagggc

SEQ ID NO: 3087 - RNA, 38 nt, Artificial Sequence
  Description of Artificial Sequence:  Enzymatic Nucleic Acid
  misc_feature (31)..(31): n stands for inosine
ccauuucccugaugaggccguuaggccgaanaugaaag

SEQ ID NO: 3088 - RNA, 38 nt, Artificial Sequence
  Description of Artificial Sequence:  Enzymatic Nucleic Acid
  misc_feature (31)..(31): n stands for inosine
ugagagaccugaugaggccguuaggccgaancuccauu

SEQ ID NO: 3089 - RNA, 38 nt, Artificial Sequence
  Description of Artificial Sequence:  Enzymatic Nucleic Acid
  misc_feature (31)..(31): n stands for inosine
gcgcugagcugaugaggccguuaggccgaanacagcuc

SEQ ID NO: 3090 - RNA, 38 nt, Artificial Sequence
  Description of Artificial Sequence:  Enzymatic Nucleic Acid
  misc_feature (31)..(31): n stands for inosine
gagcgcugcugaugaggccguuaggccgaanagacagc

SEQ ID NO: 3091 - RNA, 38 nt, Artificial Sequence
  Description of Artificial Sequence:  Enzymatic Nucleic Acid
  misc_feature (31)..(31): n stands for inosine
uggagcgccugaugaggccguuaggccgaanagagaca

SEQ ID NO: 3092 - RNA, 38 nt, Artificial Sequence
  Description of Artificial Sequence:  Enzymatic Nucleic Acid
  misc_feature (31)..(31): n stands for inosine
cuggauggcugaugaggccguuaggccgaancgcugag

SEQ ID NO: 3093 - RNA, 38 nt, Artificial Sequence
  Description of Artificial Sequence:  Enzymatic Nucleic Acid
  misc_feature (31)..(31): n stands for inosine
agcuggaucugaugaggccguuaggccgaanagcgcug

SEQ ID NO: 3094 - RNA, 38 nt, Artificial Sequence
  Description of Artificial Sequence:  Enzymatic Nucleic Acid
  misc_feature (31)..(31): n stands for inosine
aagcuggacugaugaggccguuaggccgaangagcgcu

SEQ ID NO: 3095 - RNA, 38 nt, Artificial Sequence
  Description of Artificial Sequence:  Enzymatic Nucleic Acid
  misc_feature (31)..(31): n stands for inosine
cucaagcucugaugaggccguuaggccgaanauggagc

SEQ ID NO: 3096 - RNA, 38 nt, Artificial Sequence
  Description of Artificial Sequence:  Enzymatic Nucleic Acid
  misc_feature (31)..(31): n stands for inosine
ucucaagccugaugaggccguuaggccgaangauggag

SEQ ID NO: 3097 - RNA, 38 nt, Artificial Sequence
  Description of Artificial Sequence:  Enzymatic Nucleic Acid
  misc_feature (31)..(31): n stands for inosine
uacucucacugaugaggccguuaggccgaancuggaug

SEQ ID NO: 3098 - RNA, 38 nt, Artificial Sequence
  Description of Artificial Sequence:  Enzymatic Nucleic Acid
  misc_feature (31)..(31): n stands for inosine
uucuggagcugaugaggccguuaggccgaanuuaaucc

SEQ ID NO: 3099 - RNA, 38 nt, Artificial Sequence
  Description of Artificial Sequence:  Enzymatic Nucleic Acid
  misc_feature (31)..(31): n stands for inosine
guucuggacugaugaggccguuaggccgaanguuaauc

SEQ ID NO: 3100 - RNA, 38 nt, Artificial Sequence
  Description of Artificial Sequence:  Enzymatic Nucleic Acid
  misc_feature (31)..(31): n stands for inosine
uguucuggcugaugaggccguuaggccgaangguuaau

SEQ ID NO: 3101 - RNA, 38 nt, Artificial Sequence
  Description of Artificial Sequence:  Enzymatic Nucleic Acid
  misc_feature (31)..(31): n stands for inosine
gcuguucucugaugaggccguuaggccgaanaggguua

SEQ ID NO: 3102 - RNA, 38 nt, Artificial Sequence
  Description of Artificial Sequence:  Enzymatic Nucleic Acid
  misc_feature (31)..(31): n stands for inosine
ggcuguuccugaugaggccguuaggccgaangaggguu

SEQ ID NO: 3103 - RNA, 38 nt, Artificial Sequence
  Description of Artificial Sequence:  Enzymatic Nucleic Acid
  misc_feature (31)..(31): n stands for inosine
ccacuggccugaugaggccguuaggccgaanuucugga

SEQ ID NO: 3104 - RNA, 38 nt, Artificial Sequence
  Description of Artificial Sequence:  Enzymatic Nucleic Acid
  misc_feature (31)..(31): n stands for inosine
cauccacucugaugaggccguuaggccgaancuguucu

SEQ ID NO: 3105 - RNA, 38 nt, Artificial Sequence
  Description of Artificial Sequence:  Enzymatic Nucleic Acid
  misc_feature (31)..(31): n stands for inosine
ucauccaccugaugaggccguuaggccgaangcuguuc

SEQ ID NO: 3106 - RNA, 38 nt, Artificial Sequence
  Description of Artificial Sequence:  Enzymatic Nucleic Acid
  misc_feature (31)..(31): n stands for inosine
gaucacugcugaugaggccguuaggccgaanccauuca

SEQ ID NO: 3107 - RNA, 38 nt, Artificial Sequence
  Description of Artificial Sequence:  Enzymatic Nucleic Acid
  misc_feature (31)..(31): n stands for inosine
acgaucaccugaugaggccguuaggccgaanugccauu

SEQ ID NO: 3108 - RNA, 38 nt, Artificial Sequence
  Description of Artificial Sequence:  Enzymatic Nucleic Acid
  misc_feature (31)..(31): n stands for inosine
cacggugccugaugaggccguuaggccgaanuccacga

SEQ ID NO: 3109 - RNA, 38 nt, Artificial Sequence
  Description of Artificial Sequence:  Enzymatic Nucleic Acid
  misc_feature (31)..(31): n stands for inosine
ucccacggcugaugaggccguuaggccgaancugucca

SEQ ID NO: 3110 - RNA, 38 nt, Artificial Sequence
  Description of Artificial Sequence:  Enzymatic Nucleic Acid
  misc_feature (31)..(31): n stands for inosine
uuucccaccugaugaggccguuaggccgaanugcuguc

SEQ ID NO: 3111 - RNA, 38 nt, Artificial Sequence
  Description of Artificial Sequence:  Enzymatic Nucleic Acid
  misc_feature (31)..(31): n stands for inosine
aaacaaagcugaugaggccguuaggccgaanuccuuuc

SEQ ID NO: 3112 - RNA, 38 nt, Artificial Sequence
  Description of Artificial Sequence:  Enzymatic Nucleic Acid
  misc_feature (31)..(31): n stands for inosine
agaaacaacugaugaggccguuaggccgaanuguccuu

SEQ ID NO: 3113 - RNA, 38 nt, Artificial Sequence
  Description of Artificial Sequence:  Enzymatic Nucleic Acid
  misc_feature (31)..(31): n stands for inosine
aggugauacugaugaggccguuaggccgaanaaacaaa

SEQ ID NO: 3114 - RNA, 38 nt, Artificial Sequence
  Description of Artificial Sequence:  Enzymatic Nucleic Acid
  misc_feature (31)..(31): n stands for inosine
uguccaggcugaugaggccguuaggccgaanauaagaa

SEQ ID NO: 3115 - RNA, 38 nt, Artificial Sequence
  Description of Artificial Sequence:  Enzymatic Nucleic Acid
  misc_feature (31)..(31): n stands for inosine
guuguccacugaugaggccguuaggccgaanugauaag

SEQ ID NO: 3116 - RNA, 38 nt, Artificial Sequence
  Description of Artificial Sequence:  Enzymatic Nucleic Acid
  misc_feature (31)..(31): n stands for inosine
cguugucccugaugaggccguuaggccgaangugauaa

SEQ ID NO: 3117 - RNA, 38 nt, Artificial Sequence
  Description of Artificial Sequence:  Enzymatic Nucleic Acid
  misc_feature (31)..(31): n stands for inosine
ggcugcgucugaugaggccguuaggccgaanuccaggu

SEQ ID NO: 3118 - RNA, 38 nt, Artificial Sequence
  Description of Artificial Sequence:  Enzymatic Nucleic Acid
  misc_feature (31)..(31): n stands for inosine
ggggaggccugaugaggccguuaggccgaancguuguc

SEQ ID NO: 3119 - RNA, 38 nt, Artificial Sequence
  Description of Artificial Sequence:  Enzymatic Nucleic Acid
  misc_feature (31)..(31): n stands for inosine
uuuggggacugaugaggccguuaggccgaancugcguu

SEQ ID NO: 3120 - RNA, 38 nt, Artificial Sequence
  Description of Artificial Sequence:  Enzymatic Nucleic Acid
  misc_feature (31)..(31): n stands for inosine
auuuggggcugaugaggccguuaggccgaangcugcgu

SEQ ID NO: 3121 - RNA, 38 nt, Artificial Sequence
  Description of Artificial Sequence:  Enzymatic Nucleic Acid
  misc_feature (31)..(31): n stands for inosine
ggauuuggcugaugaggccguuaggccgaanaggcugc

SEQ ID NO: 3122 - RNA, 38 nt, Artificial Sequence
  Description of Artificial Sequence:  Enzymatic Nucleic Acid
  misc_feature (31)..(31): n stands for inosine
aggauuugcugaugaggccguuaggccgaangaggcug

SEQ ID NO: 3123 - RNA, 38 nt, Artificial Sequence
  Description of Artificial Sequence:  Enzymatic Nucleic Acid
  misc_feature (31)..(31): n stands for inosine
aaggauuucugaugaggccguuaggccgaanggaggcu

SEQ ID NO: 3124 - RNA, 38 nt, Artificial Sequence
  Description of Artificial Sequence:  Enzymatic Nucleic Acid
  misc_feature (31)..(31): n stands for inosine
gaaggauucugaugaggccguuaggccgaangggaggc

SEQ ID NO: 3125 - RNA, 38 nt, Artificial Sequence
  Description of Artificial Sequence:  Enzymatic Nucleic Acid
  misc_feature (31)..(31): n stands for inosine
ccagagaacugaugaggccguuaggccgaanauuuggg

SEQ ID NO: 3126 - RNA, 38 nt, Artificial Sequence
  Description of Artificial Sequence:  Enzymatic Nucleic Acid
  misc_feature (31)..(31): n stands for inosine
cccagagacugaugaggccguuaggccgaangauuugg

SEQ ID NO: 3127 - RNA, 38 nt, Artificial Sequence
  Description of Artificial Sequence:  Enzymatic Nucleic Acid
  misc_feature (31)..(31): n stands for inosine
gaucccagcugaugaggccguuaggccgaanaaggauu

SEQ ID NO: 3128 - RNA, 38 nt, Artificial Sequence
  Description of Artificial Sequence:  Enzymatic Nucleic Acid
  misc_feature (31)..(31): n stands for inosine
gggauccccugaugaggccguuaggccgaanagaagga

SEQ ID NO: 3129 - RNA, 38 nt, Artificial Sequence
  Description of Artificial Sequence:  Enzymatic Nucleic Acid
  misc_feature (31)..(31): n stands for inosine
guccacugcugaugaggccguuaggccgaanaucccag

SEQ ID NO: 3130 - RNA, 38 nt, Artificial Sequence
  Description of Artificial Sequence:  Enzymatic Nucleic Acid
  misc_feature (31)..(31): n stands for inosine
uguccacucugaugaggccguuaggccgaangauccca

SEQ ID NO: 3131 - RNA, 38 nt, Artificial Sequence
  Description of Artificial Sequence:  Enzymatic Nucleic Acid
  misc_feature (31)..(31): n stands for inosine
cuguccaccugaugaggccguuaggccgaanggauccc

SEQ ID NO: 3132 - RNA, 38 nt, Artificial Sequence
  Description of Artificial Sequence:  Enzymatic Nucleic Acid
  misc_feature (31)..(31): n stands for inosine
cuugcuuccugaugaggccguuaggccgaanuccacug

SEQ ID NO: 3133 - RNA, 38 nt, Artificial Sequence
  Description of Artificial Sequence:  Enzymatic Nucleic Acid
  misc_feature (31)..(31): n stands for inosine
agccaccucugaugaggccguuaggccgaancuucugu

SEQ ID NO: 3134 - RNA, 38 nt, Artificial Sequence
  Description of Artificial Sequence:  Enzymatic Nucleic Acid
  misc_feature (31)..(31): n stands for inosine
cacuacaacugaugaggccguuaggccgaanccaccuu

SEQ ID NO: 3135 - RNA, 38 nt, Artificial Sequence
  Description of Artificial Sequence:  Enzymatic Nucleic Acid
  misc_feature (31)..(31): n stands for inosine
gguguuuucugaugaggccguuaggccgaanuccacua

SEQ ID NO: 3136 - RNA, 38 nt, Artificial Sequence
  Description of Artificial Sequence:  Enzymatic Nucleic Acid
  misc_feature (31)..(31): n stands for inosine
cauuuuggcugaugaggccguuaggccgaanuuuuugu

SEQ ID NO: 3137 - RNA, 38 nt, Artificial Sequence
  Description of Artificial Sequence:  Enzymatic Nucleic Acid
  misc_feature (31)..(31): n stands for inosine
gccauuuucugaugaggccguuaggccgaanuguuuuu

SEQ ID NO: 3138 - RNA, 38 nt, Artificial Sequence
  Description of Artificial Sequence:  Enzymatic Nucleic Acid
  misc_feature (31)..(31): n stands for inosine
ggccauuucugaugaggccguuaggccgaanguguuuu

SEQ ID NO: 3139 - RNA, 38 nt, Artificial Sequence
  Description of Artificial Sequence:  Enzymatic Nucleic Acid
  misc_feature (31)..(31): n stands for inosine
uggagguacugaugaggccguuaggccgaanccauuuu

SEQ ID NO: 3140 - RNA, 38 nt, Artificial Sequence
  Description of Artificial Sequence:  Enzymatic Nucleic Acid
  misc_feature (31)..(31): n stands for inosine
uuggaggucugaugaggccguuaggccgaangccauuu

SEQ ID NO: 3141 - RNA, 38 nt, Artificial Sequence
  Description of Artificial Sequence:  Enzymatic Nucleic Acid
  misc_feature (31)..(31): n stands for inosine
gauuuggacugaugaggccguuaggccgaanuaggcca

SEQ ID NO: 3142 - RNA, 38 nt, Artificial Sequence
  Description of Artificial Sequence:  Enzymatic Nucleic Acid
  misc_feature (31)..(31): n stands for inosine
ggauuuggcugaugaggccguuaggccgaanguaggcc

SEQ ID NO: 3143 - RNA, 38 nt, Artificial Sequence
  Description of Artificial Sequence:  Enzymatic Nucleic Acid
  misc_feature (31)..(31): n stands for inosine
ugggauuucugaugaggccguuaggccgaanagguagg

SEQ ID NO: 3144 - RNA, 38 nt, Artificial Sequence
  Description of Artificial Sequence:  Enzymatic Nucleic Acid
  misc_feature (31)..(31): n stands for inosine
cugggauucugaugaggccguuaggccgaangagguag

SEQ ID NO: 3145 - RNA, 38 nt, Artificial Sequence
  Description of Artificial Sequence:  Enzymatic Nucleic Acid
  misc_feature (31)..(31): n stands for inosine
aaugccugcugaugaggccguuaggccgaanauuugga

SEQ ID NO: 3146 - RNA, 38 nt, Artificial Sequence
  Description of Artificial Sequence:  Enzymatic Nucleic Acid
  misc_feature (31)..(31): n stands for inosine
caaugccucugaugaggccguuaggccgaangauuugg

SEQ ID NO: 3147 - RNA, 38 nt, Artificial Sequence
  Description of Artificial Sequence:  Enzymatic Nucleic Acid
  misc_feature (31)..(31): n stands for inosine
gcaaugcccugaugaggccguuaggccgaanggauuug

SEQ ID NO: 3148 - RNA, 38 nt, Artificial Sequence
  Description of Artificial Sequence:  Enzymatic Nucleic Acid
  misc_feature (31)..(31): n stands for inosine
cuuagcaacugaugaggccguuaggccgaanccuggga

SEQ ID NO: 3149 - RNA, 38 nt, Artificial Sequence
  Description of Artificial Sequence:  Enzymatic Nucleic Acid
  misc_feature (31)..(31): n stands for inosine
ccaaccuucugaugaggccguuaggccgaancaaugcc

SEQ ID NO: 3150 - RNA, 38 nt, Artificial Sequence
  Description of Artificial Sequence:  Enzymatic Nucleic Acid
  misc_feature (31)..(31): n stands for inosine
uuuccaagcugaugaggccguuaggccgaanccaaccu

SEQ ID NO: 3151 - RNA, 38 nt, Artificial Sequence
  Description of Artificial Sequence:  Enzymatic Nucleic Acid
  misc_feature (31)..(31): n stands for inosine
uauuuccacugaugaggccguuaggccgaanugccaac

SEQ ID NO: 3152 - RNA, 38 nt, Artificial Sequence
  Description of Artificial Sequence:  Enzymatic Nucleic Acid
  misc_feature (31)..(31): n stands for inosine
uugcagaccugaugaggccguuaggccgaanuauuucc

SEQ ID NO: 3153 - RNA, 38 nt, Artificial Sequence
  Description of Artificial Sequence:  Enzymatic Nucleic Acid
  misc_feature (31)..(31): n stands for inosine
uugcuugccugaugaggccguuaggccgaanacuguau

SEQ ID NO: 3154 - RNA, 38 nt, Artificial Sequence
  Description of Artificial Sequence:  Enzymatic Nucleic Acid
  misc_feature (31)..(31): n stands for inosine
agcuugcucugaugaggccguuaggccgaancagacug

SEQ ID NO: 3155 - RNA, 38 nt, Artificial Sequence
  Description of Artificial Sequence:  Enzymatic Nucleic Acid
  misc_feature (31)..(31): n stands for inosine
ugugagcucugaugaggccguuaggccgaancuugcag

SEQ ID NO: 3156 - RNA, 38 nt, Artificial Sequence
  Description of Artificial Sequence:  Enzymatic Nucleic Acid
  misc_feature (31)..(31): n stands for inosine
gguuugugcugaugaggccguuaggccgaancuugcuu

SEQ ID NO: 3157 - RNA, 38 nt, Artificial Sequence
  Description of Artificial Sequence:  Enzymatic Nucleic Acid
  misc_feature (31)..(31): n stands for inosine
aagguuugcugaugaggccguuaggccgaanagcuugc

SEQ ID NO: 3158 - RNA, 38 nt, Artificial Sequence
  Description of Artificial Sequence:  Enzymatic Nucleic Acid
  misc_feature (31)..(31): n stands for inosine
ucaagguucugaugaggccguuaggccgaanugagcuu

SEQ ID NO: 3159 - RNA, 38 nt, Artificial Sequence
  Description of Artificial Sequence:  Enzymatic Nucleic Acid
  misc_feature (31)..(31): n stands for inosine
agggucaacugaugaggccguuaggccgaanuuuguga

SEQ ID NO: 3160 - RNA, 38 nt, Artificial Sequence
  Description of Artificial Sequence:  Enzymatic Nucleic Acid
  misc_feature (31)..(31): n stands for inosine
cagggucacugaugaggccguuaggccgaanguuugug

SEQ ID NO: 3161 - RNA, 38 nt, Artificial Sequence
  Description of Artificial Sequence:  Enzymatic Nucleic Acid
  misc_feature (31)..(31): n stands for inosine
acagucagcugaugaggccguuaggccgaanucaaggu

SEQ ID NO: 3162 - RNA, 38 nt, Artificial Sequence
  Description of Artificial Sequence:  Enzymatic Nucleic Acid
  misc_feature (31)..(31): n stands for inosine
gacagucacugaugaggccguuaggccgaangucaagg

SEQ ID NO: 3163 - RNA, 38 nt, Artificial Sequence
  Description of Artificial Sequence:  Enzymatic Nucleic Acid
  misc_feature (31)..(31): n stands for inosine
ugacaguccugaugaggccguuaggccgaanggucaag

SEQ ID NO: 3164 - RNA, 38 nt, Artificial Sequence
  Description of Artificial Sequence:  Enzymatic Nucleic Acid
  misc_feature (31)..(31): n stands for inosine
gacgugaccugaugaggccguuaggccgaanucagggu

SEQ ID NO: 3165 - RNA, 38 nt, Artificial Sequence
  Description of Artificial Sequence:  Enzymatic Nucleic Acid
  misc_feature (31)..(31): n stands for inosine
acgggacgcugaugaggccguuaggccgaanacaguca

SEQ ID NO: 3166 - RNA, 38 nt, Artificial Sequence
  Description of Artificial Sequence:  Enzymatic Nucleic Acid
  misc_feature (31)..(31): n stands for inosine
gacgcacgcugaugaggccguuaggccgaanacgugac

SEQ ID NO: 3167 - RNA, 38 nt, Artificial Sequence
  Description of Artificial Sequence:  Enzymatic Nucleic Acid
  misc_feature (31)..(31): n stands for inosine
ggacgcaccugaugaggccguuaggccgaangacguga

SEQ ID NO: 3168 - RNA, 38 nt, Artificial Sequence
  Description of Artificial Sequence:  Enzymatic Nucleic Acid
  misc_feature (31)..(31): n stands for inosine
guagcauucugaugaggccguuaggccgaanacgcacg

SEQ ID NO: 3169 - RNA, 38 nt, Artificial Sequence
  Description of Artificial Sequence:  Enzymatic Nucleic Acid
  misc_feature (31)..(31): n stands for inosine
gguagcaucugaugaggccguuaggccgaangacgcac

SEQ ID NO: 3170 - RNA, 38 nt, Artificial Sequence
  Description of Artificial Sequence:  Enzymatic Nucleic Acid
  misc_feature (31)..(31): n stands for inosine
ggcagggucugaugaggccguuaggccgaancauugga

SEQ ID NO: 3171 - RNA, 38 nt, Artificial Sequence
  Description of Artificial Sequence:  Enzymatic Nucleic Acid
  misc_feature (31)..(31): n stands for inosine
ggaggcagcugaugaggccguuaggccgaanuagcauu

SEQ ID NO: 3172 - RNA, 38 nt, Artificial Sequence
  Description of Artificial Sequence:  Enzymatic Nucleic Acid
  misc_feature (31)..(31): n stands for inosine
uggaggcacugaugaggccguuaggccgaanguagcau

SEQ ID NO: 3173 - RNA, 38 nt, Artificial Sequence
  Description of Artificial Sequence:  Enzymatic Nucleic Acid
  misc_feature (31)..(31): n stands for inosine
uuggaggccugaugaggccguuaggccgaangguagca

SEQ ID NO: 3174 - RNA, 38 nt, Artificial Sequence
  Description of Artificial Sequence:  Enzymatic Nucleic Acid
  misc_feature (31)..(31): n stands for inosine
uaauuggacugaugaggccguuaggccgaancagggua

SEQ ID NO: 3175 - RNA, 38 nt, Artificial Sequence
  Description of Artificial Sequence:  Enzymatic Nucleic Acid
  misc_feature (31)..(31): n stands for inosine
guaauuggcugaugaggccguuaggccgaangcagggu

SEQ ID NO: 3176 - RNA, 38 nt, Artificial Sequence
  Description of Artificial Sequence:  Enzymatic Nucleic Acid
  misc_feature (31)..(31): n stands for inosine
cuguaauucugaugaggccguuaggccgaanaggcagg

SEQ ID NO: 3177 - RNA, 38 nt, Artificial Sequence
  Description of Artificial Sequence:  Enzymatic Nucleic Acid
  misc_feature (31)..(31): n stands for inosine
acuguaaucugaugaggccguuaggccgaangaggcag

SEQ ID NO: 3178 - RNA, 38 nt, Artificial Sequence
  Description of Artificial Sequence:  Enzymatic Nucleic Acid
  misc_feature (31)..(31): n stands for inosine
gaagucaccugaugaggccguuaggccgaanuaauugg

SEQ ID NO: 3179 - RNA, 38 nt, Artificial Sequence
  Description of Artificial Sequence:  Enzymatic Nucleic Acid
  misc_feature (31)..(31): n stands for inosine
guuuuggacugaugaggccguuaggccgaanucacugu

SEQ ID NO: 3180 - RNA, 38 nt, Artificial Sequence
  Description of Artificial Sequence:  Enzymatic Nucleic Acid
  misc_feature (31)..(31): n stands for inosine
uucguuuucugaugaggccguuaggccgaanaagucac

SEQ ID NO: 3181 - RNA, 38 nt, Artificial Sequence
  Description of Artificial Sequence:  Enzymatic Nucleic Acid
  misc_feature (31)..(31): n stands for inosine
guucguuucugaugaggccguuaggccgaangaaguca

SEQ ID NO: 3182 - RNA, 38 nt, Artificial Sequence
  Description of Artificial Sequence:  Enzymatic Nucleic Acid
  misc_feature (31)..(31): n stands for inosine
gguguccucugaugaggccguuaggccgaanuucguuu

SEQ ID NO: 3183 - RNA, 38 nt, Artificial Sequence
  Description of Artificial Sequence:  Enzymatic Nucleic Acid
  misc_feature (31)..(31): n stands for inosine
uuugcuggcugaugaggccguuaggccgaanuccuugu

SEQ ID NO: 3184 - RNA, 38 nt, Artificial Sequence
  Description of Artificial Sequence:  Enzymatic Nucleic Acid
  misc_feature (31)..(31): n stands for inosine
aauuugcucugaugaggccguuaggccgaanuguccuu

SEQ ID NO: 3185 - RNA, 38 nt, Artificial Sequence
  Description of Artificial Sequence:  Enzymatic Nucleic Acid
  misc_feature (31)..(31): n stands for inosine
gaauuugccugaugaggccguuaggccgaanguguccu

SEQ ID NO: 3186 - RNA, 38 nt, Artificial Sequence
  Description of Artificial Sequence:  Enzymatic Nucleic Acid
  misc_feature (31)..(31): n stands for inosine
ggggaauucugaugaggccguuaggccgaancuggugu

SEQ ID NO: 3187 - RNA, 38 nt, Artificial Sequence
  Description of Artificial Sequence:  Enzymatic Nucleic Acid
  misc_feature (31)..(31): n stands for inosine
agggcuggcugaugaggccguuaggccgaanaauuugc

SEQ ID NO: 3188 - RNA, 38 nt, Artificial Sequence
  Description of Artificial Sequence:  Enzymatic Nucleic Acid
  misc_feature (31)..(31): n stands for inosine
gagggcugcugaugaggccguuaggccgaangaauuug

SEQ ID NO: 3189 - RNA, 38 nt, Artificial Sequence
  Description of Artificial Sequence:  Enzymatic Nucleic Acid
  misc_feature (31)..(31): n stands for inosine
agagggcucugaugaggccguuaggccgaanggaauuu

SEQ ID NO: 3190 - RNA, 38 nt, Artificial Sequence
  Description of Artificial Sequence:  Enzymatic Nucleic Acid
  misc_feature (31)..(31): n stands for inosine
cagagggccugaugaggccguuaggccgaangggaauu

SEQ ID NO: 3191 - RNA, 38 nt, Artificial Sequence
  Description of Artificial Sequence:  Enzymatic Nucleic Acid
  misc_feature (31)..(31): n stands for inosine
uaccagagcugaugaggccguuaggccgaancugggga

SEQ ID NO: 3192 - RNA, 38 nt, Artificial Sequence
  Description of Artificial Sequence:  Enzymatic Nucleic Acid
  misc_feature (31)..(31): n stands for inosine
cuaccagacugaugaggccguuaggccgaangcugggg

SEQ ID NO: 3193 - RNA, 38 nt, Artificial Sequence
  Description of Artificial Sequence:  Enzymatic Nucleic Acid
  misc_feature (31)..(31): n stands for inosine
acuaccagcugaugaggccguuaggccgaanggcuggg

SEQ ID NO: 3194 - RNA, 38 nt, Artificial Sequence
  Description of Artificial Sequence:  Enzymatic Nucleic Acid
  misc_feature (31)..(31): n stands for inosine
aaacuacccugaugaggccguuaggccgaanagggcug

SEQ ID NO: 3195 - RNA, 38 nt, Artificial Sequence
  Description of Artificial Sequence:  Enzymatic Nucleic Acid
  misc_feature (31)..(31): n stands for inosine
cgaauauucugaugaggccguuaggccgaancauaaac

SEQ ID NO: 3196 - RNA, 38 nt, Artificial Sequence
  Description of Artificial Sequence:  Enzymatic Nucleic Acid
  misc_feature (31)..(31): n stands for inosine
ggcuccuucugaugaggccguuaggccgaancgaauau

SEQ ID NO: 3197 - RNA, 38 nt, Artificial Sequence
  Description of Artificial Sequence:  Enzymatic Nucleic Acid
  misc_feature (31)..(31): n stands for inosine
aggcuccucugaugaggccguuaggccgaangcgaaua

SEQ ID NO: 3198 - RNA, 38 nt, Artificial Sequence
  Description of Artificial Sequence:  Enzymatic Nucleic Acid
  misc_feature (31)..(31): n stands for inosine
auuggggacugaugaggccguuaggccgaancuccuug

SEQ ID NO: 3199 - RNA, 38 nt, Artificial Sequence
  Description of Artificial Sequence:  Enzymatic Nucleic Acid
  misc_feature (31)..(31): n stands for inosine
aauuggggcugaugaggccguuaggccgaangcuccuu

SEQ ID NO: 3200 - RNA, 38 nt, Artificial Sequence
  Description of Artificial Sequence:  Enzymatic Nucleic Acid
  misc_feature (31)..(31): n stands for inosine
agaauuggcugaugaggccguuaggccgaanaggcucc

SEQ ID NO: 3201 - RNA, 38 nt, Artificial Sequence
  Description of Artificial Sequence:  Enzymatic Nucleic Acid
  misc_feature (31)..(31): n stands for inosine
gagaauugcugaugaggccguuaggccgaangaggcuc

SEQ ID NO: 3202 - RNA, 38 nt, Artificial Sequence
  Description of Artificial Sequence:  Enzymatic Nucleic Acid
  misc_feature (31)..(31): n stands for inosine
ugagaauucugaugaggccguuaggccgaanggaggcu

SEQ ID NO: 3203 - RNA, 38 nt, Artificial Sequence
  Description of Artificial Sequence:  Enzymatic Nucleic Acid
  misc_feature (31)..(31): n stands for inosine
cugagaaucugaugaggccguuaggccgaangggaggc

SEQ ID NO: 3204 - RNA, 38 nt, Artificial Sequence
  Description of Artificial Sequence:  Enzymatic Nucleic Acid
  misc_feature (31)..(31): n stands for inosine
uggcccugcugaugaggccguuaggccgaanaauuggg

SEQ ID NO: 3205 - RNA, 38 nt, Artificial Sequence
  Description of Artificial Sequence:  Enzymatic Nucleic Acid
  misc_feature (31)..(31): n stands for inosine
acuggccccugaugaggccguuaggccgaanagaauug

SEQ ID NO: 3206 - RNA, 38 nt, Artificial Sequence
  Description of Artificial Sequence:  Enzymatic Nucleic Acid
  misc_feature (31)..(31): n stands for inosine
gugacacucugaugaggccguuaggccgaancccugag

SEQ ID NO: 3207 - RNA, 38 nt, Artificial Sequence
  Description of Artificial Sequence:  Enzymatic Nucleic Acid
  misc_feature (31)..(31): n stands for inosine
ugugacaccugaugaggccguuaggccgaangcccuga

SEQ ID NO: 3208 - RNA, 38 nt, Artificial Sequence
  Description of Artificial Sequence:  Enzymatic Nucleic Acid
  misc_feature (31)..(31): n stands for inosine
cagggcugcugaugaggccguuaggccgaanacacugg

SEQ ID NO: 3209 - RNA, 38 nt, Artificial Sequence
  Description of Artificial Sequence:  Enzymatic Nucleic Acid
  misc_feature (31)..(31): n stands for inosine
aucagggccugaugaggccguuaggccgaanugacacu

SEQ ID NO: 3210 - RNA, 38 nt, Artificial Sequence
  Description of Artificial Sequence:  Enzymatic Nucleic Acid
  misc_feature (31)..(31): n stands for inosine
ucaaucagcugaugaggccguuaggccgaancugugac

SEQ ID NO: 3211 - RNA, 38 nt, Artificial Sequence
  Description of Artificial Sequence:  Enzymatic Nucleic Acid
  misc_feature (31)..(31): n stands for inosine
uucaaucacugaugaggccguuaggccgaangcuguga

SEQ ID NO: 3212 - RNA, 38 nt, Artificial Sequence
  Description of Artificial Sequence:  Enzymatic Nucleic Acid
  misc_feature (31)..(31): n stands for inosine
auucaauccugaugaggccguuaggccgaanggcugug

SEQ ID NO: 3213 - RNA, 38 nt, Artificial Sequence
  Description of Artificial Sequence:  Enzymatic Nucleic Acid
  misc_feature (31)..(31): n stands for inosine
ccauucaccugaugaggccguuaggccgaanauucaau

SEQ ID NO: 3214 - RNA, 38 nt, Artificial Sequence
  Description of Artificial Sequence:  Enzymatic Nucleic Acid
  misc_feature (31)..(31): n stands for inosine
aagguaaccugaugaggccguuaggccgaanuuuuucc

SEQ ID NO: 3215 - RNA, 38 nt, Artificial Sequence
  Description of Artificial Sequence:  Enzymatic Nucleic Acid
  misc_feature (31)..(31): n stands for inosine
aguuccaacugaugaggccguuaggccgaanuaacugu

SEQ ID NO: 3216 - RNA, 38 nt, Artificial Sequence
  Description of Artificial Sequence:  Enzymatic Nucleic Acid
  misc_feature (31)..(31): n stands for inosine
uaguuccacugaugaggccguuaggccgaanguaacug

SEQ ID NO: 3217 - RNA, 38 nt, Artificial Sequence
  Description of Artificial Sequence:  Enzymatic Nucleic Acid
  misc_feature (31)..(31): n stands for inosine
uauccagucugaugaggccguuaggccgaanuuccaag

SEQ ID NO: 3218 - RNA, 38 nt, Artificial Sequence
  Description of Artificial Sequence:  Enzymatic Nucleic Acid
  misc_feature (31)..(31): n stands for inosine
cauuaucccugaugaggccguuaggccgaanuaguucc

SEQ ID NO: 3219 - RNA, 38 nt, Artificial Sequence
  Description of Artificial Sequence:  Enzymatic Nucleic Acid
  misc_feature (31)..(31): n stands for inosine
ucagcacccugaugaggccguuaggccgaancuccauu

SEQ ID NO: 3220 - RNA, 38 nt, Artificial Sequence
  Description of Artificial Sequence:  Enzymatic Nucleic Acid
  misc_feature (31)..(31): n stands for inosine
guagcauccugaugaggccguuaggccgaancaccugc

SEQ ID NO: 3221 - RNA, 38 nt, Artificial Sequence
  Description of Artificial Sequence:  Enzymatic Nucleic Acid
  misc_feature (31)..(31): n stands for inosine
uccuuagucugaugaggccguuaggccgaancaucagc

SEQ ID NO: 3222 - RNA, 38 nt, Artificial Sequence
  Description of Artificial Sequence:  Enzymatic Nucleic Acid
  misc_feature (31)..(31): n stands for inosine
ucauccuucugaugaggccguuaggccgaanuagcauc

SEQ ID NO: 3223 - RNA, 38 nt, Artificial Sequence
  Description of Artificial Sequence:  Enzymatic Nucleic Acid
  misc_feature (31)..(31): n stands for inosine
ccuugagucugaugaggccguuaggccgaanacaccgu

SEQ ID NO: 3224 - RNA, 38 nt, Artificial Sequence
  Description of Artificial Sequence:  Enzymatic Nucleic Acid
  misc_feature (31)..(31): n stands for inosine
auaccuugcugaugaggccguuaggccgaanuagacac

SEQ ID NO: 3225 - RNA, 38 nt, Artificial Sequence
  Description of Artificial Sequence:  Enzymatic Nucleic Acid
  misc_feature (31)..(31): n stands for inosine
aaauaccucugaugaggccguuaggccgaanaguagac

SEQ ID NO: 3226 - RNA, 38 nt, Artificial Sequence
  Description of Artificial Sequence:  Enzymatic Nucleic Acid
  misc_feature (31)..(31): n stands for inosine
auaaguugcugaugaggccguuaggccgaanaaauacc

SEQ ID NO: 3227 - RNA, 38 nt, Artificial Sequence
  Description of Artificial Sequence:  Enzymatic Nucleic Acid
  misc_feature (31)..(31): n stands for inosine
ucauaagucugaugaggccguuaggccgaanugaaaua

SEQ ID NO: 3228 - RNA, 38 nt, Artificial Sequence
  Description of Artificial Sequence:  Enzymatic Nucleic Acid
  misc_feature (31)..(31): n stands for inosine
gugucauacugaugaggccguuaggccgaanuugugaa

SEQ ID NO: 3229 - RNA, 38 nt, Artificial Sequence
  Description of Artificial Sequence:  Enzymatic Nucleic Acid
  misc_feature (31)..(31): n stands for inosine
accauucgcugaugaggccguuaggccgaanucauaag

SEQ ID NO: 3230 - RNA, 38 nt, Artificial Sequence
  Description of Artificial Sequence:  Enzymatic Nucleic Acid
  misc_feature (31)..(31): n stands for inosine
uuuuacaccugaugaggccguuaggccgaanuaucuac

SEQ ID NO: 3231 - RNA, 38 nt, Artificial Sequence
  Description of Artificial Sequence:  Enzymatic Nucleic Acid
  misc_feature (31)..(31): n stands for inosine
ccucccagcugaugaggccguuaggccgaancccgcac

SEQ ID NO: 3232 - RNA, 38 nt, Artificial Sequence
  Description of Artificial Sequence:  Enzymatic Nucleic Acid
  misc_feature (31)..(31): n stands for inosine
cuccuccccugaugaggccguuaggccgaanagcccgc

SEQ ID NO: 3233 - RNA, 38 nt, Artificial Sequence
  Description of Artificial Sequence:  Enzymatic Nucleic Acid
  misc_feature (31)..(31): n stands for inosine
cgucuggccugaugaggccguuaggccgaancguuaac

SEQ ID NO: 3234 - RNA, 38 nt, Artificial Sequence
  Description of Artificial Sequence:  Enzymatic Nucleic Acid
  misc_feature (31)..(31): n stands for inosine
cuccgucucugaugaggccguuaggccgaancugcguu

SEQ ID NO: 3235 - RNA, 38 nt, Artificial Sequence
  Description of Artificial Sequence:  Enzymatic Nucleic Acid
  misc_feature (31)..(31): n stands for inosine
ucuccguccugaugaggccguuaggccgaangcugcgu

SEQ ID NO: 3236 - RNA, 38 nt, Artificial Sequence
  Description of Artificial Sequence:  Enzymatic Nucleic Acid
  misc_feature (31)..(31): n stands for inosine
ucugcuggcugaugaggccguuaggccgaanuaucacu

SEQ ID NO: 3237 - RNA, 38 nt, Artificial Sequence
  Description of Artificial Sequence:  Enzymatic Nucleic Acid
  misc_feature (31)..(31): n stands for inosine
cucugcugcugaugaggccguuaggccgaanguaucac

SEQ ID NO: 3238 - RNA, 38 nt, Artificial Sequence
  Description of Artificial Sequence:  Enzymatic Nucleic Acid
  misc_feature (31)..(31): n stands for inosine
acucugcucugaugaggccguuaggccgaangguauca

SEQ ID NO: 3239 - RNA, 38 nt, Artificial Sequence
  Description of Artificial Sequence:  Enzymatic Nucleic Acid
  misc_feature (31)..(31): n stands for inosine
cacucugccugaugaggccguuaggccgaanggguauc

SEQ ID NO: 3240 - RNA, 38 nt, Artificial Sequence
  Description of Artificial Sequence:  Enzymatic Nucleic Acid
  misc_feature (31)..(31): n stands for inosine
cuccacuccugaugaggccguuaggccgaancuggggu

SEQ ID NO: 3241 - RNA, 38 nt, Artificial Sequence
  Description of Artificial Sequence:  Enzymatic Nucleic Acid
  misc_feature (31)..(31): n stands for inosine
auguacagcugaugaggccguuaggccgaancuccacu

SEQ ID NO: 3242 - RNA, 38 nt, Artificial Sequence
  Description of Artificial Sequence:  Enzymatic Nucleic Acid
  misc_feature (31)..(31): n stands for inosine
guauguaccugaugaggccguuaggccgaanugcucca

SEQ ID NO: 3243 - RNA, 38 nt, Artificial Sequence
  Description of Artificial Sequence:  Enzymatic Nucleic Acid
  misc_feature (31)..(31): n stands for inosine
gccagguacugaugaggccguuaggccgaanuacagug

SEQ ID NO: 3244 - RNA, 38 nt, Artificial Sequence
  Description of Artificial Sequence:  Enzymatic Nucleic Acid
  misc_feature (31)..(31): n stands for inosine
uccagccacugaugaggccguuaggccgaanuauguac

SEQ ID NO: 3245 - RNA, 38 nt, Artificial Sequence
  Description of Artificial Sequence:  Enzymatic Nucleic Acid
  misc_feature (31)..(31): n stands for inosine
auccagcccugaugaggccguuaggccgaanguaugua

SEQ ID NO: 3246 - RNA, 38 nt, Artificial Sequence
  Description of Artificial Sequence:  Enzymatic Nucleic Acid
  misc_feature (31)..(31): n stands for inosine
cucaaucccugaugaggccguuaggccgaanccaggua

SEQ ID NO: 3247 - RNA, 38 nt, Artificial Sequence
  Description of Artificial Sequence:  Enzymatic Nucleic Acid
  misc_feature (31)..(31): n stands for inosine
gauuccaucugaugaggccguuaggccgaanuauuuca

SEQ ID NO: 3248 - RNA, 38 nt, Artificial Sequence
  Description of Artificial Sequence:  Enzymatic Nucleic Acid
  misc_feature (31)..(31): n stands for inosine
gucuuggucugaugaggccguuaggccgaanauuccau

SEQ ID NO: 3249 - RNA, 38 nt, Artificial Sequence
  Description of Artificial Sequence:  Enzymatic Nucleic Acid
  misc_feature (31)..(31): n stands for inosine
ggucuuggcugaugaggccguuaggccgaangauucca

SEQ ID NO: 3250 - RNA, 38 nt, Artificial Sequence
  Description of Artificial Sequence:  Enzymatic Nucleic Acid
  misc_feature (31)..(31): n stands for inosine
caggucuucugaugaggccguuaggccgaanuggauuc

SEQ ID NO: 3251 - RNA, 38 nt, Artificial Sequence
  Description of Artificial Sequence:  Enzymatic Nucleic Acid
  misc_feature (31)..(31): n stands for inosine
ucaggucucugaugaggccguuaggccgaanguggauu

SEQ ID NO: 3252 - RNA, 38 nt, Artificial Sequence
  Description of Artificial Sequence:  Enzymatic Nucleic Acid
  misc_feature (31)..(31): n stands for inosine
uaauuucacugaugaggccguuaggccgaanucuuggu

SEQ ID NO: 3253 - RNA, 38 nt, Artificial Sequence
  Description of Artificial Sequence:  Enzymatic Nucleic Acid
  misc_feature (31)..(31): n stands for inosine
uuaauuuccugaugaggccguuaggccgaangucuugg

SEQ ID NO: 3254 - RNA, 38 nt, Artificial Sequence
  Description of Artificial Sequence:  Enzymatic Nucleic Acid
  misc_feature (31)..(31): n stands for inosine
gcuugugucugaugaggccguuaggccgaanaacauca

SEQ ID NO: 3255 - RNA, 38 nt, Artificial Sequence
  Description of Artificial Sequence:  Enzymatic Nucleic Acid
  misc_feature (31)..(31): n stands for inosine
cuugcuugcugaugaggccguuaggccgaanuugaaca

SEQ ID NO: 3256 - RNA, 38 nt, Artificial Sequence
  Description of Artificial Sequence:  Enzymatic Nucleic Acid
  misc_feature (31)..(31): n stands for inosine
cacuugcucugaugaggccguuaggccgaanuguugaa

SEQ ID NO: 3257 - RNA, 38 nt, Artificial Sequence
  Description of Artificial Sequence:  Enzymatic Nucleic Acid
  misc_feature (31)..(31): n stands for inosine
aacacacucugaugaggccguuaggccgaancuugugu

SEQ ID NO: 3258 - RNA, 38 nt, Artificial Sequence
  Description of Artificial Sequence:  Enzymatic Nucleic Acid
  misc_feature (31)..(31): n stands for inosine
uguucugccugaugaggccguuaggccgaanaaacaca

SEQ ID NO: 3259 - RNA, 38 nt, Artificial Sequence
  Description of Artificial Sequence:  Enzymatic Nucleic Acid
  misc_feature (31)..(31): n stands for inosine
ggauguuccugaugaggccguuaggccgaancugaaac

SEQ ID NO: 3260 - RNA, 38 nt, Artificial Sequence
  Description of Artificial Sequence:  Enzymatic Nucleic Acid
  misc_feature (31)..(31): n stands for inosine
cccgaggacugaugaggccguuaggccgaanuucugcu

SEQ ID NO: 3261 - RNA, 38 nt, Artificial Sequence
  Description of Artificial Sequence:  Enzymatic Nucleic Acid
  misc_feature (31)..(31): n stands for inosine
ccucccgacugaugaggccguuaggccgaanauguucu

SEQ ID NO: 3262 - RNA, 38 nt, Artificial Sequence
  Description of Artificial Sequence:  Enzymatic Nucleic Acid
  misc_feature (31)..(31): n stands for inosine
gccucccgcugaugaggccguuaggccgaangauguuc

SEQ ID NO: 3263 - RNA, 38 nt, Artificial Sequence
  Description of Artificial Sequence:  Enzymatic Nucleic Acid
  misc_feature (31)..(31): n stands for inosine
cacaaaugcugaugaggccguuaggccgaanccucccg

SEQ ID NO: 3264 - RNA, 38 nt, Artificial Sequence
  Description of Artificial Sequence:  Enzymatic Nucleic Acid
  misc_feature (31)..(31): n stands for inosine
gccacaaacugaugaggccguuaggccgaanagccucc

SEQ ID NO: 3265 - RNA, 38 nt, Artificial Sequence
  Description of Artificial Sequence:  Enzymatic Nucleic Acid
  misc_feature (31)..(31): n stands for inosine
acaucagacugaugaggccguuaggccgaanccacaaa

SEQ ID NO: 3266 - RNA, 38 nt, Artificial Sequence
  Description of Artificial Sequence:  Enzymatic Nucleic Acid
  misc_feature (31)..(31): n stands for inosine
gggacauccugaugaggccguuaggccgaanaagccac

SEQ ID NO: 3267 - RNA, 38 nt, Artificial Sequence
  Description of Artificial Sequence:  Enzymatic Nucleic Acid
  misc_feature (31)..(31): n stands for inosine
agcauuugcugaugaggccguuaggccgaanacaucag

SEQ ID NO: 3268 - RNA, 38 nt, Artificial Sequence
  Description of Artificial Sequence:  Enzymatic Nucleic Acid
  misc_feature (31)..(31): n stands for inosine
gagcauuucugaugaggccguuaggccgaangacauca

SEQ ID NO: 3269 - RNA, 38 nt, Artificial Sequence
  Description of Artificial Sequence:  Enzymatic Nucleic Acid
  misc_feature (31)..(31): n stands for inosine
ggagcauucugaugaggccguuaggccgaanggacauc

SEQ ID NO: 3270 - RNA, 38 nt, Artificial Sequence
  Description of Artificial Sequence:  Enzymatic Nucleic Acid
  misc_feature (31)..(31): n stands for inosine
gguaugggcugaugaggccguuaggccgaancauuugg

SEQ ID NO: 3271 - RNA, 38 nt, Artificial Sequence
  Description of Artificial Sequence:  Enzymatic Nucleic Acid
  misc_feature (31)..(31): n stands for inosine
cagguaugcugaugaggccguuaggccgaanagcauuu

SEQ ID NO: 3272 - RNA, 38 nt, Artificial Sequence
  Description of Artificial Sequence:  Enzymatic Nucleic Acid
  misc_feature (31)..(31): n stands for inosine
ucagguaucugaugaggccguuaggccgaangagcauu

SEQ ID NO: 3273 - RNA, 38 nt, Artificial Sequence
  Description of Artificial Sequence:  Enzymatic Nucleic Acid
  misc_feature (31)..(31): n stands for inosine
aucagguacugaugaggccguuaggccgaanggagcau

SEQ ID NO: 3274 - RNA, 38 nt, Artificial Sequence
  Description of Artificial Sequence:  Enzymatic Nucleic Acid
  misc_feature (31)..(31): n stands for inosine
agagaucacugaugaggccguuaggccgaanuauggga

SEQ ID NO: 3275 - RNA, 38 nt, Artificial Sequence
  Description of Artificial Sequence:  Enzymatic Nucleic Acid
  misc_feature (31)..(31): n stands for inosine
aagagauccugaugaggccguuaggccgaanguauggg

SEQ ID NO: 3276 - RNA, 38 nt, Artificial Sequence
  Description of Artificial Sequence:  Enzymatic Nucleic Acid
  misc_feature (31)..(31): n stands for inosine
gugggaagcugaugaggccguuaggccgaanaucaggu

SEQ ID NO: 3277 - RNA, 38 nt, Artificial Sequence
  Description of Artificial Sequence:  Enzymatic Nucleic Acid
  misc_feature (31)..(31): n stands for inosine
aggugggacugaugaggccguuaggccgaanagaucag

SEQ ID NO: 3278 - RNA, 38 nt, Artificial Sequence
  Description of Artificial Sequence:  Enzymatic Nucleic Acid
  misc_feature (31)..(31): n stands for inosine
gccaggugcugaugaggccguuaggccgaanaagagau

SEQ ID NO: 3279 - RNA, 38 nt, Artificial Sequence
  Description of Artificial Sequence:  Enzymatic Nucleic Acid
  misc_feature (31)..(31): n stands for inosine
ggccaggucugaugaggccguuaggccgaangaagaga

SEQ ID NO: 3280 - RNA, 38 nt, Artificial Sequence
  Description of Artificial Sequence:  Enzymatic Nucleic Acid
  misc_feature (31)..(31): n stands for inosine
uggccaggcugaugaggccguuaggccgaanggaagag

SEQ ID NO: 3281 - RNA, 38 nt, Artificial Sequence
  Description of Artificial Sequence:  Enzymatic Nucleic Acid
  misc_feature (31)..(31): n stands for inosine
uuuggccacugaugaggccguuaggccgaanugggaag

SEQ ID NO: 3282 - RNA, 38 nt, Artificial Sequence
  Description of Artificial Sequence:  Enzymatic Nucleic Acid
  misc_feature (31)..(31): n stands for inosine
auuuggcccugaugaggccguuaggccgaangugggaa

SEQ ID NO: 3283 - RNA, 38 nt, Artificial Sequence
  Description of Artificial Sequence:  Enzymatic Nucleic Acid
  misc_feature (31)..(31): n stands for inosine
ggugauuucugaugaggccguuaggccgaanccaggug

SEQ ID NO: 3284 - RNA, 38 nt, Artificial Sequence
  Description of Artificial Sequence:  Enzymatic Nucleic Acid
  misc_feature (31)..(31): n stands for inosine
cggugauucugaugaggccguuaggccgaangccaggu

SEQ ID NO: 3285 - RNA, 38 nt, Artificial Sequence
  Description of Artificial Sequence:  Enzymatic Nucleic Acid
  misc_feature (31)..(31): n stands for inosine
caggucggcugaugaggccguuaggccgaanauuuggc

SEQ ID NO: 3286 - RNA, 38 nt, Artificial Sequence
  Description of Artificial Sequence:  Enzymatic Nucleic Acid
  misc_feature (31)..(31): n stands for inosine
uucagguccugaugaggccguuaggccgaanugauuug

SEQ ID NO: 3287 - RNA, 38 nt, Artificial Sequence
  Description of Artificial Sequence:  Enzymatic Nucleic Acid
  misc_feature (31)..(31): n stands for inosine
cgccuucacugaugaggccguuaggccgaanucgguga

SEQ ID NO: 3288 - RNA, 38 nt, Artificial Sequence
  Description of Artificial Sequence:  Enzymatic Nucleic Acid
  misc_feature (31)..(31): n stands for inosine
ccgccuuccugaugaggccguuaggccgaangucggug

SEQ ID NO: 3289 - RNA, 38 nt, Artificial Sequence
  Description of Artificial Sequence:  Enzymatic Nucleic Acid
  misc_feature (31)..(31): n stands for inosine
ugcccccgcugaugaggccguuaggccgaanaauuucc

SEQ ID NO: 3290 - RNA, 38 nt, Artificial Sequence
  Description of Artificial Sequence:  Enzymatic Nucleic Acid
  misc_feature (31)..(31): n stands for inosine
aaugagaccugaugaggccguuaggccgaancccccgu

SEQ ID NO: 3291 - RNA, 38 nt, Artificial Sequence
  Description of Artificial Sequence:  Enzymatic Nucleic Acid
  misc_feature (31)..(31): n stands for inosine
gauuaaugcugaugaggccguuaggccgaanacugccc

SEQ ID NO: 3292 - RNA, 38 nt, Artificial Sequence
  Description of Artificial Sequence:  Enzymatic Nucleic Acid
  misc_feature (31)..(31): n stands for inosine
cagauuaacugaugaggccguuaggccgaanagacugc

SEQ ID NO: 3293 - RNA, 38 nt, Artificial Sequence
  Description of Artificial Sequence:  Enzymatic Nucleic Acid
  misc_feature (31)..(31): n stands for inosine
uccaaguccugaugaggccguuaggccgaanauuaaug

SEQ ID NO: 3294 - RNA, 38 nt, Artificial Sequence
  Description of Artificial Sequence:  Enzymatic Nucleic Acid
  misc_feature (31)..(31): n stands for inosine
gcuguccacugaugaggccguuaggccgaanucagauu

SEQ ID NO: 3295 - RNA, 38 nt, Artificial Sequence
  Description of Artificial Sequence:  Enzymatic Nucleic Acid
  misc_feature (31)..(31): n stands for inosine
ccaggagccugaugaggccguuaggccgaanuccaagu

SEQ ID NO: 3296 - RNA, 38 nt, Artificial Sequence
  Description of Artificial Sequence:  Enzymatic Nucleic Acid
  misc_feature (31)..(31): n stands for inosine
uccccaggcugaugaggccguuaggccgaancugucca

SEQ ID NO: 3297 - RNA, 38 nt, Artificial Sequence
  Description of Artificial Sequence:  Enzymatic Nucleic Acid
  misc_feature (31)..(31): n stands for inosine
cauccccacugaugaggccguuaggccgaanagcuguc

SEQ ID NO: 3298 - RNA, 38 nt, Artificial Sequence
  Description of Artificial Sequence:  Enzymatic Nucleic Acid
  misc_feature (31)..(31): n stands for inosine
ucaucccccugaugaggccguuaggccgaangagcugu

SEQ ID NO: 3299 - RNA, 38 nt, Artificial Sequence
  Description of Artificial Sequence:  Enzymatic Nucleic Acid
  misc_feature (31)..(31): n stands for inosine
uguuccaucugaugaggccguuaggccgaanucauaau

SEQ ID NO: 3300 - RNA, 38 nt, Artificial Sequence
  Description of Artificial Sequence:  Enzymatic Nucleic Acid
  misc_feature (31)..(31): n stands for inosine
cuguuccacugaugaggccguuaggccgaangucauaa

SEQ ID NO: 3301 - RNA, 38 nt, Artificial Sequence
  Description of Artificial Sequence:  Enzymatic Nucleic Acid
  misc_feature (31)..(31): n stands for inosine
uugugagccugaugaggccguuaggccgaanuuccaug

SEQ ID NO: 3302 - RNA, 38 nt, Artificial Sequence
  Description of Artificial Sequence:  Enzymatic Nucleic Acid
  misc_feature (31)..(31): n stands for inosine
uacuugugcugaugaggccguuaggccgaancuguucc

SEQ ID NO: 3303 - RNA, 38 nt, Artificial Sequence
  Description of Artificial Sequence:  Enzymatic Nucleic Acid
  misc_feature (31)..(31): n stands for inosine
uauacuugcugaugaggccguuaggccgaanagcuguu

SEQ ID NO: 3304 - RNA, 38 nt, Artificial Sequence
  Description of Artificial Sequence:  Enzymatic Nucleic Acid
  misc_feature (31)..(31): n stands for inosine
gauauacucugaugaggccguuaggccgaanugagcug

SEQ ID NO: 3305 - RNA, 38 nt, Artificial Sequence
  Description of Artificial Sequence:  Enzymatic Nucleic Acid
  misc_feature (31)..(31): n stands for inosine
uauucgaacugaugaggccguuaggccgaanauauacu

SEQ ID NO: 3306 - RNA, 38 nt, Artificial Sequence
  Description of Artificial Sequence:  Enzymatic Nucleic Acid
  misc_feature (31)..(31): n stands for inosine
agaauacucugaugaggccguuaggccgaanuacuuau

SEQ ID NO: 3307 - RNA, 38 nt, Artificial Sequence
  Description of Artificial Sequence:  Enzymatic Nucleic Acid
  misc_feature (31)..(31): n stands for inosine
ugagaucacugaugaggccguuaggccgaanaauacuu

SEQ ID NO: 3308 - RNA, 38 nt, Artificial Sequence
  Description of Artificial Sequence:  Enzymatic Nucleic Acid
  misc_feature (31)..(31): n stands for inosine
ugucucugcugaugaggccguuaggccgaanaucaaga

SEQ ID NO: 3309 - RNA, 38 nt, Artificial Sequence
  Description of Artificial Sequence:  Enzymatic Nucleic Acid
  misc_feature (31)..(31): n stands for inosine
cuugucuccugaugaggccguuaggccgaanagaucaa

SEQ ID NO: 3310 - RNA, 38 nt, Artificial Sequence
  Description of Artificial Sequence:  Enzymatic Nucleic Acid
  misc_feature (31)..(31): n stands for inosine
auugaacucugaugaggccguuaggccgaanucucuga

SEQ ID NO: 3311 - RNA, 38 nt, Artificial Sequence
  Description of Artificial Sequence:  Enzymatic Nucleic Acid
  misc_feature (31)..(31): n stands for inosine
agauucaucugaugaggccguuaggccgaanaacuugu

SEQ ID NO: 3312 - RNA, 38 nt, Artificial Sequence
  Description of Artificial Sequence:  Enzymatic Nucleic Acid
  misc_feature (31)..(31): n stands for inosine
acuugaagcugaugaggccguuaggccgaanauucauu

SEQ ID NO: 3313 - RNA, 38 nt, Artificial Sequence
  Description of Artificial Sequence:  Enzymatic Nucleic Acid
  misc_feature (31)..(31): n stands for inosine
ucacuugacugaugaggccguuaggccgaanagauuca

SEQ ID NO: 3314 - RNA, 38 nt, Artificial Sequence
  Description of Artificial Sequence:  Enzymatic Nucleic Acid
  misc_feature (31)..(31): n stands for inosine
uauucacucugaugaggccguuaggccgaanaagagau

SEQ ID NO: 3315 - RNA, 38 nt, Artificial Sequence
  Description of Artificial Sequence:  Enzymatic Nucleic Acid
  misc_feature (31)..(31): n stands for inosine
agagcagucugaugaggccguuaggccgaanuauucac

SEQ ID NO: 3316 - RNA, 38 nt, Artificial Sequence
  Description of Artificial Sequence:  Enzymatic Nucleic Acid
  misc_feature (31)..(31): n stands for inosine
augagagccugaugaggccguuaggccgaanuaguauu

SEQ ID NO: 3317 - RNA, 38 nt, Artificial Sequence
  Description of Artificial Sequence:  Enzymatic Nucleic Acid
  misc_feature (31)..(31): n stands for inosine
gggaugagcugaugaggccguuaggccgaancaguagu

SEQ ID NO: 3318 - RNA, 38 nt, Artificial Sequence
  Description of Artificial Sequence:  Enzymatic Nucleic Acid
  misc_feature (31)..(31): n stands for inosine
uugggaugcugaugaggccguuaggccgaanagcagua

SEQ ID NO: 3319 - RNA, 38 nt, Artificial Sequence
  Description of Artificial Sequence:  Enzymatic Nucleic Acid
  misc_feature (31)..(31): n stands for inosine
cuuugggacugaugaggccguuaggccgaanagagcag

SEQ ID NO: 3320 - RNA, 38 nt, Artificial Sequence
  Description of Artificial Sequence:  Enzymatic Nucleic Acid
  misc_feature (31)..(31): n stands for inosine
uuccuuugcugaugaggccguuaggccgaanaugagag

SEQ ID NO: 3321 - RNA, 38 nt, Artificial Sequence
  Description of Artificial Sequence:  Enzymatic Nucleic Acid
  misc_feature (31)..(31): n stands for inosine
cuuccuuucugaugaggccguuaggccgaangaugaga

SEQ ID NO: 3322 - RNA, 38 nt, Artificial Sequence
  Description of Artificial Sequence:  Enzymatic Nucleic Acid
  misc_feature (31)..(31): n stands for inosine
gcuuccuucugaugaggccguuaggccgaanggaugag

SEQ ID NO: 3323 - RNA, 38 nt, Artificial Sequence
  Description of Artificial Sequence:  Enzymatic Nucleic Acid
  misc_feature (31)..(31): n stands for inosine
ucagaguucugaugaggccguuaggccgaancuuccuu

SEQ ID NO: 3324 - RNA, 38 nt, Artificial Sequence
  Description of Artificial Sequence:  Enzymatic Nucleic Acid
  misc_feature (31)..(31): n stands for inosine
cucagagucugaugaggccguuaggccgaangcuuccu

SEQ ID NO: 3325 - RNA, 38 nt, Artificial Sequence
  Description of Artificial Sequence:  Enzymatic Nucleic Acid
  misc_feature (31)..(31): n stands for inosine
uuccucagcugaugaggccguuaggccgaanuuggcuu

SEQ ID NO: 3326 - RNA, 38 nt, Artificial Sequence
  Description of Artificial Sequence:  Enzymatic Nucleic Acid
  misc_feature (31)..(31): n stands for inosine
acuuccuccugaugaggccguuaggccgaanaguuggc

SEQ ID NO: 3327 - RNA, 38 nt, Artificial Sequence
  Description of Artificial Sequence:  Enzymatic Nucleic Acid
  misc_feature (31)..(31): n stands for inosine
aaacaaaacugaugaggccguuaggccgaanacuuccu

SEQ ID NO: 3328 - RNA, 38 nt, Artificial Sequence
  Description of Artificial Sequence:  Enzymatic Nucleic Acid
  misc_feature (31)..(31): n stands for inosine
uguuuucucugaugaggccguuaggccgaanuuuaaac

SEQ ID NO: 3329 - RNA, 38 nt, Artificial Sequence
  Description of Artificial Sequence:  Enzymatic Nucleic Acid
  misc_feature (31)..(31): n stands for inosine
auguuuuccugaugaggccguuaggccgaanguuuaaa

SEQ ID NO: 3330 - RNA, 38 nt, Artificial Sequence
  Description of Artificial Sequence:  Enzymatic Nucleic Acid
  misc_feature (31)..(31): n stands for inosine
aaaaguaacugaugaggccguuaggccgaanuuuucug

SEQ ID NO: 3331 - RNA, 38 nt, Artificial Sequence
  Description of Artificial Sequence:  Enzymatic Nucleic Acid
  misc_feature (31)..(31): n stands for inosine
uuuucaaacugaugaggccguuaggccgaanuaauguu

SEQ ID NO: 3332 - RNA, 38 nt, Artificial Sequence
  Description of Artificial Sequence:  Enzymatic Nucleic Acid
  misc_feature (31)..(31): n stands for inosine
aagaucugcugaugaggccguuaggccgaanccauuuu

SEQ ID NO: 3333 - RNA, 38 nt, Artificial Sequence
  Description of Artificial Sequence:  Enzymatic Nucleic Acid
  misc_feature (31)..(31): n stands for inosine
aaaagauccugaugaggccguuaggccgaanugccauu

SEQ ID NO: 3334 - RNA, 38 nt, Artificial Sequence
  Description of Artificial Sequence:  Enzymatic Nucleic Acid
  misc_feature (31)..(31): n stands for inosine
caaugaaacugaugaggccguuaggccgaanaucugug

SEQ ID NO: 3335 - RNA, 38 nt, Artificial Sequence
  Description of Artificial Sequence:  Enzymatic Nucleic Acid
  misc_feature (31)..(31): n stands for inosine
aauagcaacugaugaggccguuaggccgaanaaaagau

SEQ ID NO: 3336 - RNA, 38 nt, Artificial Sequence
  Description of Artificial Sequence:  Enzymatic Nucleic Acid
  misc_feature (31)..(31): n stands for inosine
gccugaaucugaugaggccguuaggccgaancaaugaa

SEQ ID NO: 3337 - RNA, 38 nt, Artificial Sequence
  Description of Artificial Sequence:  Enzymatic Nucleic Acid
  misc_feature (31)..(31): n stands for inosine
caacagcccugaugaggccguuaggccgaanaauagca

SEQ ID NO: 3338 - RNA, 38 nt, Artificial Sequence
  Description of Artificial Sequence:  Enzymatic Nucleic Acid
  misc_feature (31)..(31): n stands for inosine
uuaucaaccugaugaggccguuaggccgaanccugaau

SEQ ID NO: 3339 - RNA, 38 nt, Artificial Sequence
  Description of Artificial Sequence:  Enzymatic Nucleic Acid
  misc_feature (31)..(31): n stands for inosine
cugauuuccugaugaggccguuaggccgaanaucgacc

SEQ ID NO: 3340 - RNA, 38 nt, Artificial Sequence
  Description of Artificial Sequence:  Enzymatic Nucleic Acid
  misc_feature (31)..(31): n stands for inosine
gauauuuccugaugaggccguuaggccgaanauuucag

SEQ ID NO: 3341 - RNA, 38 nt, Artificial Sequence
  Description of Artificial Sequence:  Enzymatic Nucleic Acid
  misc_feature (31)..(31): n stands for inosine
gcaauguucugaugaggccguuaggccgaanauauuuc

SEQ ID NO: 3342 - RNA, 38 nt, Artificial Sequence
  Description of Artificial Sequence:  Enzymatic Nucleic Acid
  misc_feature (31)..(31): n stands for inosine
ugcaaugucugaugaggccguuaggccgaangauauuu

SEQ ID NO: 3343 - RNA, 38 nt, Artificial Sequence
  Description of Artificial Sequence:  Enzymatic Nucleic Acid
  misc_feature (31)..(31): n stands for inosine
ucgugcaacugaugaggccguuaggccgaanuuggaua

SEQ ID NO: 3344 - RNA, 38 nt, Artificial Sequence
  Description of Artificial Sequence:  Enzymatic Nucleic Acid
  misc_feature (31)..(31): n stands for inosine
gauacucgcugaugaggccguuaggccgaancaauguu

SEQ ID NO: 3345 - RNA, 38 nt, Artificial Sequence
  Description of Artificial Sequence:  Enzymatic Nucleic Acid
  misc_feature (31)..(31): n stands for inosine
auaaacaacugaugaggccguuaggccgaanauacucg

SEQ ID NO: 3346 - RNA, 38 nt, Artificial Sequence
  Description of Artificial Sequence:  Enzymatic Nucleic Acid
  misc_feature (31)..(31): n stands for inosine
ucuguggacugaugaggccguuaggccgaanaauaaac

SEQ ID NO: 3347 - RNA, 38 nt, Artificial Sequence
  Description of Artificial Sequence:  Enzymatic Nucleic Acid
  misc_feature (31)..(31): n stands for inosine
gucuguggcugaugaggccguuaggccgaangaauaaa

SEQ ID NO: 3348 - RNA, 38 nt, Artificial Sequence
  Description of Artificial Sequence:  Enzymatic Nucleic Acid
  misc_feature (31)..(31): n stands for inosine
gagucugucugaugaggccguuaggccgaanaggaaua

SEQ ID NO: 3349 - RNA, 38 nt, Artificial Sequence
  Description of Artificial Sequence:  Enzymatic Nucleic Acid
  misc_feature (31)..(31): n stands for inosine
ggagucugcugaugaggccguuaggccgaangaggaau

SEQ ID NO: 3350 - RNA, 38 nt, Artificial Sequence
  Description of Artificial Sequence:  Enzymatic Nucleic Acid
  misc_feature (31)..(31): n stands for inosine
gcggaguccugaugaggccguuaggccgaanuggagga

SEQ ID NO: 3351 - RNA, 38 nt, Artificial Sequence
  Description of Artificial Sequence:  Enzymatic Nucleic Acid
  misc_feature (31)..(31): n stands for inosine
ucuggcggcugaugaggccguuaggccgaanucugugg

SEQ ID NO: 3352 - RNA, 38 nt, Artificial Sequence
  Description of Artificial Sequence:  Enzymatic Nucleic Acid
  misc_feature (31)..(31): n stands for inosine
ucucuggccugaugaggccguuaggccgaanagucugu

SEQ ID NO: 3353 - RNA, 38 nt, Artificial Sequence
  Description of Artificial Sequence:  Enzymatic Nucleic Acid
  misc_feature (31)..(31): n stands for inosine
gugucucucugaugaggccguuaggccgaancggaguc

SEQ ID NO: 3354 - RNA, 38 nt, Artificial Sequence
  Description of Artificial Sequence:  Enzymatic Nucleic Acid
  misc_feature (31)..(31): n stands for inosine
ggugucuccugaugaggccguuaggccgaangcggagu

SEQ ID NO: 3355 - RNA, 38 nt, Artificial Sequence
  Description of Artificial Sequence:  Enzymatic Nucleic Acid
  misc_feature (31)..(31): n stands for inosine
ggacuaggcugaugaggccguuaggccgaanucucugg

SEQ ID NO: 3356 - RNA, 38 nt, Artificial Sequence
  Description of Artificial Sequence:  Enzymatic Nucleic Acid
  misc_feature (31)..(31): n stands for inosine
caggacuacugaugaggccguuaggccgaanugucucu

SEQ ID NO: 3357 - RNA, 38 nt, Artificial Sequence
  Description of Artificial Sequence:  Enzymatic Nucleic Acid
  misc_feature (31)..(31): n stands for inosine
ucaggacucugaugaggccguuaggccgaangugucuc

SEQ ID NO: 3358 - RNA, 38 nt, Artificial Sequence
  Description of Artificial Sequence:  Enzymatic Nucleic Acid
  misc_feature (31)..(31): n stands for inosine
uuucaucacugaugaggccguuaggccgaanacuaggu

SEQ ID NO: 3359 - RNA, 38 nt, Artificial Sequence
  Description of Artificial Sequence:  Enzymatic Nucleic Acid
  misc_feature (31)..(31): n stands for inosine
guuucauccugaugaggccguuaggccgaangacuagg

SEQ ID NO: 3360 - RNA, 38 nt, Artificial Sequence
  Description of Artificial Sequence:  Enzymatic Nucleic Acid
  misc_feature (31)..(31): n stands for inosine
caaggagccugaugaggccguuaggccgaanacguuuc

SEQ ID NO: 3361 - RNA, 38 nt, Artificial Sequence
  Description of Artificial Sequence:  Enzymatic Nucleic Acid
  misc_feature (31)..(31): n stands for inosine
ggacaaggcugaugaggccguuaggccgaancagacgu

SEQ ID NO: 3362 - RNA, 38 nt, Artificial Sequence
  Description of Artificial Sequence:  Enzymatic Nucleic Acid
  misc_feature (31)..(31): n stands for inosine
uaggacaacugaugaggccguuaggccgaanagcagac

SEQ ID NO: 3363 - RNA, 38 nt, Artificial Sequence
  Description of Artificial Sequence:  Enzymatic Nucleic Acid
  misc_feature (31)..(31): n stands for inosine
uuaggacacugaugaggccguuaggccgaangagcaga

SEQ ID NO: 3364 - RNA, 38 nt, Artificial Sequence
  Description of Artificial Sequence:  Enzymatic Nucleic Acid
  misc_feature (31)..(31): n stands for inosine
gaauauuacugaugaggccguuaggccgaanacaagga

SEQ ID NO: 3365 - RNA, 38 nt, Artificial Sequence
  Description of Artificial Sequence:  Enzymatic Nucleic Acid
  misc_feature (31)..(31): n stands for inosine
ugaauauucugaugaggccguuaggccgaangacaagg

SEQ ID NO: 3366 - RNA, 38 nt, Artificial Sequence
  Description of Artificial Sequence:  Enzymatic Nucleic Acid
  misc_feature (31)..(31): n stands for inosine
uguugauacugaugaggccguuaggccgaanaauauua

SEQ ID NO: 3367 - RNA, 38 nt, Artificial Sequence
  Description of Artificial Sequence:  Enzymatic Nucleic Acid
  misc_feature (31)..(31): n stands for inosine
ggugcugucugaugaggccguuaggccgaanauaugaa

SEQ ID NO: 3368 - RNA, 38 nt, Artificial Sequence
  Description of Artificial Sequence:  Enzymatic Nucleic Acid
  misc_feature (31)..(31): n stands for inosine
aauggugccugaugaggccguuaggccgaanuugauau

SEQ ID NO: 3369 - RNA, 38 nt, Artificial Sequence
  Description of Artificial Sequence:  Enzymatic Nucleic Acid
  misc_feature (31)..(31): n stands for inosine
aggaauggcugaugaggccguuaggccgaancuguuga

SEQ ID NO: 3370 - RNA, 38 nt, Artificial Sequence
  Description of Artificial Sequence:  Enzymatic Nucleic Acid
  misc_feature (31)..(31): n stands for inosine
ccaggaaucugaugaggccguuaggccgaanugcuguu

SEQ ID NO: 3371 - RNA, 38 nt, Artificial Sequence
  Description of Artificial Sequence:  Enzymatic Nucleic Acid
  misc_feature (31)..(31): n stands for inosine
gccaggaacugaugaggccguuaggccgaangugcugu

SEQ ID NO: 3372 - RNA, 38 nt, Artificial Sequence
  Description of Artificial Sequence:  Enzymatic Nucleic Acid
  misc_feature (31)..(31): n stands for inosine
gaaugccacugaugaggccguuaggccgaanaauggug

SEQ ID NO: 3373 - RNA, 38 nt, Artificial Sequence
  Description of Artificial Sequence:  Enzymatic Nucleic Acid
  misc_feature (31)..(31): n stands for inosine
ugaaugcccugaugaggccguuaggccgaangaauggu

SEQ ID NO: 3374 - RNA, 38 nt, Artificial Sequence
  Description of Artificial Sequence:  Enzymatic Nucleic Acid
  misc_feature (31)..(31): n stands for inosine
aaugugaacugaugaggccguuaggccgaanccaggaa

SEQ ID NO: 3375 - RNA, 38 nt, Artificial Sequence
  Description of Artificial Sequence:  Enzymatic Nucleic Acid
  misc_feature (31)..(31): n stands for inosine
uuaaaaugcugaugaggccguuaggccgaanaaugcca

SEQ ID NO: 3376 - RNA, 38 nt, Artificial Sequence
  Description of Artificial Sequence:  Enzymatic Nucleic Acid
  misc_feature (31)..(31): n stands for inosine
uuuuaaaacugaugaggccguuaggccgaanugaaugc

SEQ ID NO: 3377 - RNA, 38 nt, Artificial Sequence
  Description of Artificial Sequence:  Enzymatic Nucleic Acid
  misc_feature (31)..(31): n stands for inosine
acagcugccugaugaggccguuaggccgaanuucuccu

SEQ ID NO: 3378 - RNA, 38 nt, Artificial Sequence
  Description of Artificial Sequence:  Enzymatic Nucleic Acid
  misc_feature (31)..(31): n stands for inosine
uugacagccugaugaggccguuaggccgaancaguucu

SEQ ID NO: 3379 - RNA, 38 nt, Artificial Sequence
  Description of Artificial Sequence:  Enzymatic Nucleic Acid
  misc_feature (31)..(31): n stands for inosine
cuauugaccugaugaggccguuaggccgaancugcagu

SEQ ID NO: 3380 - RNA, 38 nt, Artificial Sequence
  Description of Artificial Sequence:  Enzymatic Nucleic Acid
  misc_feature (31)..(31): n stands for inosine
uaggcuaucugaugaggccguuaggccgaanacagcug

SEQ ID NO: 3381 - RNA, 38 nt, Artificial Sequence
  Description of Artificial Sequence:  Enzymatic Nucleic Acid
  misc_feature (31)..(31): n stands for inosine
cagcccuacugaugaggccguuaggccgaancuauuga

SEQ ID NO: 3382 - RNA, 38 nt, Artificial Sequence
  Description of Artificial Sequence:  Enzymatic Nucleic Acid
  misc_feature (31)..(31): n stands for inosine
ucagcccucugaugaggccguuaggccgaangcuauug

SEQ ID NO: 3383 - RNA, 38 nt, Artificial Sequence
  Description of Artificial Sequence:  Enzymatic Nucleic Acid
  misc_feature (31)..(31): n stands for inosine
aaaaauuccugaugaggccguuaggccgaancccuagg

SEQ ID NO: 3384 - RNA, 38 nt, Artificial Sequence
  Description of Artificial Sequence:  Enzymatic Nucleic Acid
  misc_feature (31)..(31): n stands for inosine
uauuuauccugaugaggccguuaggccgaanacaaaaa

SEQ ID NO: 3385 - RNA, 38 nt, Artificial Sequence
  Description of Artificial Sequence:  Enzymatic Nucleic Acid
  misc_feature (31)..(31): n stands for inosine
aggaugaacugaugaggccguuaggccgaanauuuauu

SEQ ID NO: 3386 - RNA, 38 nt, Artificial Sequence
  Description of Artificial Sequence:  Enzymatic Nucleic Acid
  misc_feature (31)..(31): n stands for inosine
aaaaaggacugaugaggccguuaggccgaanaaugauu

SEQ ID NO: 3387 - RNA, 38 nt, Artificial Sequence
  Description of Artificial Sequence:  Enzymatic Nucleic Acid
  misc_feature (31)..(31): n stands for inosine
caaaaaaacugaugaggccguuaggccgaanaugaaug

SEQ ID NO: 3388 - RNA, 38 nt, Artificial Sequence
  Description of Artificial Sequence:  Enzymatic Nucleic Acid
  misc_feature (31)..(31): n stands for inosine
ucaaaaaacugaugaggccguuaggccgaangaugaau

SEQ ID NO: 3389 - RNA, 38 nt, Artificial Sequence
  Description of Artificial Sequence:  Enzymatic Nucleic Acid
  misc_feature (31)..(31): n stands for inosine
uacauuuucugaugaggccguuaggccgaanaaaauuu

SEQ ID NO: 3390 - RNA, 38 nt, Artificial Sequence
  Description of Artificial Sequence:  Enzymatic Nucleic Acid
  misc_feature (31)..(31): n stands for inosine
cuacaggacugaugaggccguuaggccgaanucuaaaa

SEQ ID NO: 3391 - RNA, 38 nt, Artificial Sequence
  Description of Artificial Sequence:  Enzymatic Nucleic Acid
  misc_feature (31)..(31): n stands for inosine
ccccuacacugaugaggccguuaggccgaanaagucua

SEQ ID NO: 3392 - RNA, 38 nt, Artificial Sequence
  Description of Artificial Sequence:  Enzymatic Nucleic Acid
  misc_feature (31)..(31): n stands for inosine
cccccuaccugaugaggccguuaggccgaangaagucu

SEQ ID NO: 3393 - RNA, 38 nt, Artificial Sequence
  Description of Artificial Sequence:  Enzymatic Nucleic Acid
  misc_feature (31)..(31): n stands for inosine
auacauuucugaugaggccguuaggccgaanuauaucg

SEQ ID NO: 3394 - RNA, 38 nt, Artificial Sequence
  Description of Artificial Sequence:  Enzymatic Nucleic Acid
  misc_feature (31)..(31): n stands for inosine
aguauaaacugaugaggccguuaggccgaanuacuaua

SEQ ID NO: 3395 - RNA, 38 nt, Artificial Sequence
  Description of Artificial Sequence:  Enzymatic Nucleic Acid
  misc_feature (31)..(31): n stands for inosine
auacauuucugaugaggccguuaggccgaanuauaaau

SEQ ID NO: 3396 - RNA, 38 nt, Artificial Sequence
  Description of Artificial Sequence:  Enzymatic Nucleic Acid
  misc_feature (31)..(31): n stands for inosine
ccccuacacugaugaggccguuaggccgaanaauacau

SEQ ID NO: 3397 - RNA, 38 nt, Artificial Sequence
  Description of Artificial Sequence:  Enzymatic Nucleic Acid
  misc_feature (31)..(31): n stands for inosine
cccccuaccugaugaggccguuaggccgaangaauaca

SEQ ID NO: 3398 - RNA, 38 nt, Artificial Sequence
  Description of Artificial Sequence:  Enzymatic Nucleic Acid
  misc_feature (31)..(31): n stands for inosine
aguuguuucugaugaggccguuaggccgaancauuuua

SEQ ID NO: 3399 - RNA, 38 nt, Artificial Sequence
  Description of Artificial Sequence:  Enzymatic Nucleic Acid
  misc_feature (31)..(31): n stands for inosine
uacccagucugaugaggccguuaggccgaanuuuagca

SEQ ID NO: 3400 - RNA, 37 nt, Artificial Sequence
  Description of Artificial Sequence:  Enzymatic Nucleic Acid
aaaauauuugauggcaugcacuaugcgcgaauuauau

SEQ ID NO: 3401 - RNA, 37 nt, Artificial Sequence
  Description of Artificial Sequence:  Enzymatic Nucleic Acid
caccucuuugauggcaugcacuaugcgcgaugcuccc

SEQ ID NO: 3402 - RNA, 37 nt, Artificial Sequence
  Description of Artificial Sequence:  Enzymatic Nucleic Acid
cauaaccuugauggcaugcacuaugcgcgaacaccuc

SEQ ID NO: 3403 - RNA, 37 nt, Artificial Sequence
  Description of Artificial Sequence:  Enzymatic Nucleic Acid
ucugccuuugauggcaugcacuaugcgcgagcugugc

SEQ ID NO: 3404 - RNA, 37 nt, Artificial Sequence
  Description of Artificial Sequence:  Enzymatic Nucleic Acid
ucaaauugugauggcaugcacuaugcgcgguacuugu

SEQ ID NO: 3405 - RNA, 37 nt, Artificial Sequence
  Description of Artificial Sequence:  Enzymatic Nucleic Acid
cuuagucuugauggcaugcacuaugcgcgaaauugcg

SEQ ID NO: 3406 - RNA, 37 nt, Artificial Sequence
  Description of Artificial Sequence:  Enzymatic Nucleic Acid
cuugucuuugauggcaugcacuaugcgcgaauaggag

SEQ ID NO: 3407 - RNA, 37 nt, Artificial Sequence
  Description of Artificial Sequence:  Enzymatic Nucleic Acid
ugguuuauugauggcaugcacuaugcgcgacaggucu

SEQ ID NO: 3408 - RNA, 37 nt, Artificial Sequence
  Description of Artificial Sequence:  Enzymatic Nucleic Acid
caacuuauugauggcaugcacuaugcgcgggaagugg

SEQ ID NO: 3409 - RNA, 37 nt, Artificial Sequence
  Description of Artificial Sequence:  Enzymatic Nucleic Acid
ggaaaaugugauggcaugcacuaugcgcgggguuacg

SEQ ID NO: 3410 - RNA, 37 nt, Artificial Sequence
  Description of Artificial Sequence:  Enzymatic Nucleic Acid
ugaagaauugauggcaugcacuaugcgcgaagaugaa

SEQ ID NO: 3411 - RNA, 37 nt, Artificial Sequence
  Description of Artificial Sequence:  Enzymatic Nucleic Acid
gaauuacuugauggcaugcacuaugcgcgagggcccc

SEQ ID NO: 3412 - RNA, 37 nt, Artificial Sequence
  Description of Artificial Sequence:  Enzymatic Nucleic Acid
uuguuguuugauggcaugcacuaugcgcgagcugaau

SEQ ID NO: 3413 - RNA, 37 nt, Artificial Sequence
  Description of Artificial Sequence:  Enzymatic Nucleic Acid
aaugccuuugauggcaugcacuaugcgcgauagccau

SEQ ID NO: 3414 - RNA, 37 nt, Artificial Sequence
  Description of Artificial Sequence:  Enzymatic Nucleic Acid
gucgauugugauggcaugcacuaugcgcgaacgacaa

SEQ ID NO: 3415 - RNA, 37 nt, Artificial Sequence
  Description of Artificial Sequence:  Enzymatic Nucleic Acid
auugggguugauggcaugcacuaugcgcggauugcaa

SEQ ID NO: 3416 - RNA, 37 nt, Artificial Sequence
  Description of Artificial Sequence:  Enzymatic Nucleic Acid
ucuucuggugauggcaugcacuaugcgcgacauuggg

SEQ ID NO: 3417 - RNA, 37 nt, Artificial Sequence
  Description of Artificial Sequence:  Enzymatic Nucleic Acid
gaguguuuugauggcaugcacuaugcgcgaucuucug

SEQ ID NO: 3418 - RNA, 37 nt, Artificial Sequence
  Description of Artificial Sequence:  Enzymatic Nucleic Acid
gccuggguugauggcaugcacuaugcgcgaccauguc

SEQ ID NO: 3419 - RNA, 37 nt, Artificial Sequence
  Description of Artificial Sequence:  Enzymatic Nucleic Acid
uguagcuuugauggcaugcacuaugcgcgaaacagau

SEQ ID NO: 3420 - RNA, 37 nt, Artificial Sequence
  Description of Artificial Sequence:  Enzymatic Nucleic Acid
aauaaaauugauggcaugcacuaugcgcggcuuuccu

SEQ ID NO: 3421 - RNA, 37 nt, Artificial Sequence
  Description of Artificial Sequence:  Enzymatic Nucleic Acid
caaaauggugauggcaugcacuaugcgcgaacauuuu

SEQ ID NO: 3422 - RNA, 37 nt, Artificial Sequence
  Description of Artificial Sequence:  Enzymatic Nucleic Acid
ucaggaauugauggcaugcacuaugcgcgaaaauggc

SEQ ID NO: 3423 - RNA, 37 nt, Artificial Sequence
  Description of Artificial Sequence:  Enzymatic Nucleic Acid
ccauguuuugauggcaugcacuaugcgcgaggaauca

SEQ ID NO: 3424 - RNA, 37 nt, Artificial Sequence
  Description of Artificial Sequence:  Enzymatic Nucleic Acid
cacauaguugauggcaugcacuaugcgcgagccuuug

SEQ ID NO: 3425 - RNA, 37 nt, Artificial Sequence
  Description of Artificial Sequence:  Enzymatic Nucleic Acid
uuuggucuugauggcaugcacuaugcgcgacauaguc

SEQ ID NO: 3426 - RNA, 37 nt, Artificial Sequence
  Description of Artificial Sequence:  Enzymatic Nucleic Acid
guaggucuugauggcaugcacuaugcgcgaaguuuug

SEQ ID NO: 3427 - RNA, 37 nt, Artificial Sequence
  Description of Artificial Sequence:  Enzymatic Nucleic Acid
aacaucagugauggcaugcacuaugcgcgauuuuugu

SEQ ID NO: 3428 - RNA, 37 nt, Artificial Sequence
  Description of Artificial Sequence:  Enzymatic Nucleic Acid
cagaacauugauggcaugcacuaugcgcgagcauuuu

SEQ ID NO: 3429 - RNA, 37 nt, Artificial Sequence
  Description of Artificial Sequence:  Enzymatic Nucleic Acid
agacucagugauggcaugcacuaugcgcgaaccagaa

SEQ ID NO: 3430 - RNA, 37 nt, Artificial Sequence
  Description of Artificial Sequence:  Enzymatic Nucleic Acid
aguagacuugauggcaugcacuaugcgcgagcaacca

SEQ ID NO: 3431 - RNA, 37 nt, Artificial Sequence
  Description of Artificial Sequence:  Enzymatic Nucleic Acid
ggguucauugauggcaugcacuaugcgcgauuaccug

SEQ ID NO: 3432 - RNA, 37 nt, Artificial Sequence
  Description of Artificial Sequence:  Enzymatic Nucleic Acid
guaggguuugauggcaugcacuaugcgcgaucauuac

SEQ ID NO: 3433 - RNA, 37 nt, Artificial Sequence
  Description of Artificial Sequence:  Enzymatic Nucleic Acid
caucugcuugauggcaugcacuaugcgcgaguguagg

SEQ ID NO: 3434 - RNA, 37 nt, Artificial Sequence
  Description of Artificial Sequence:  Enzymatic Nucleic Acid
gauccuuuugauggcaugcacuaugcgcgacccuucu

SEQ ID NO: 3435 - RNA, 37 nt, Artificial Sequence
  Description of Artificial Sequence:  Enzymatic Nucleic Acid
aaugaaauugauggcaugcacuaugcgcgaggaguga

SEQ ID NO: 3436 - RNA, 37 nt, Artificial Sequence
  Description of Artificial Sequence:  Enzymatic Nucleic Acid
uuuuccugugauggcaugcacuaugcgcgaaugaaau

SEQ ID NO: 3437 - RNA, 37 nt, Artificial Sequence
  Description of Artificial Sequence:  Enzymatic Nucleic Acid
uccauauuugauggcaugcacuaugcgcgagcuaacu

SEQ ID NO: 3438 - RNA, 37 nt, Artificial Sequence
  Description of Artificial Sequence:  Enzymatic Nucleic Acid
agcccacuugauggcaugcacuaugcgcgauggacaa

SEQ ID NO: 3439 - RNA, 37 nt, Artificial Sequence
  Description of Artificial Sequence:  Enzymatic Nucleic Acid
cuccccauugauggcaugcacuaugcgcgguagauga

SEQ ID NO: 3440 - RNA, 37 nt, Artificial Sequence
  Description of Artificial Sequence:  Enzymatic Nucleic Acid
guacucguugauggcaugcacuaugcgcgaaauacuc

SEQ ID NO: 3441 - RNA, 37 nt, Artificial Sequence
  Description of Artificial Sequence:  Enzymatic Nucleic Acid
auuguacuugauggcaugcacuaugcgcggucaaaua

SEQ ID NO: 3442 - RNA, 37 nt, Artificial Sequence
  Description of Artificial Sequence:  Enzymatic Nucleic Acid
uuucucauugauggcaugcacuaugcgcgauuauugu

SEQ ID NO: 3443 - RNA, 37 nt, Artificial Sequence
  Description of Artificial Sequence:  Enzymatic Nucleic Acid
gaauuucuugauggcaugcacuaugcgcgaucauuau

SEQ ID NO: 3444 - RNA, 37 nt, Artificial Sequence
  Description of Artificial Sequence:  Enzymatic Nucleic Acid
ugaaugugugauggcaugcacuaugcgcgaucuuuug

SEQ ID NO: 3445 - RNA, 37 nt, Artificial Sequence
  Description of Artificial Sequence:  Enzymatic Nucleic Acid
uccuuuuuugauggcaugcacuaugcgcgauagaguc

SEQ ID NO: 3446 - RNA, 37 nt, Artificial Sequence
  Description of Artificial Sequence:  Enzymatic Nucleic Acid
aacaaacuugauggcaugcacuaugcgcgacauccuu

SEQ ID NO: 3447 - RNA, 37 nt, Artificial Sequence
  Description of Artificial Sequence:  Enzymatic Nucleic Acid
ccgucuggugauggcaugcacuaugcgcggggauugg

SEQ ID NO: 3448 - RNA, 37 nt, Artificial Sequence
  Description of Artificial Sequence:  Enzymatic Nucleic Acid
auguugugugauggcaugcacuaugcgcgaaacauua

SEQ ID NO: 3449 - RNA, 37 nt, Artificial Sequence
  Description of Artificial Sequence:  Enzymatic Nucleic Acid
uauagaauugauggcaugcacuaugcgcgaacauguu

SEQ ID NO: 3450 - RNA, 37 nt, Artificial Sequence
  Description of Artificial Sequence:  Enzymatic Nucleic Acid
acagaauuugauggcaugcacuaugcgcgaacuauag

SEQ ID NO: 3451 - RNA, 37 nt, Artificial Sequence
  Description of Artificial Sequence:  Enzymatic Nucleic Acid
ggagauugugauggcaugcacuaugcgcgauuuuuga

SEQ ID NO: 3452 - RNA, 37 nt, Artificial Sequence
  Description of Artificial Sequence:  Enzymatic Nucleic Acid
augugcuuugauggcaugcacuaugcgcgggagauug

SEQ ID NO: 3453 - RNA, 37 nt, Artificial Sequence
  Description of Artificial Sequence:  Enzymatic Nucleic Acid
ucacggauugauggcaugcacuaugcgcgacuuccca

SEQ ID NO: 3454 - RNA, 37 nt, Artificial Sequence
  Description of Artificial Sequence:  Enzymatic Nucleic Acid
cucagaauugauggcaugcacuaugcgcgacggauca

SEQ ID NO: 3455 - RNA, 37 nt, Artificial Sequence
  Description of Artificial Sequence:  Enzymatic Nucleic Acid
aaaguccuugauggcaugcacuaugcgcgagaaucac

SEQ ID NO: 3456 - RNA, 37 nt, Artificial Sequence
  Description of Artificial Sequence:  Enzymatic Nucleic Acid
uguguuguugauggcaugcacuaugcgcgauaggagu

SEQ ID NO: 3457 - RNA, 37 nt, Artificial Sequence
  Description of Artificial Sequence:  Enzymatic Nucleic Acid
aucugcagugauggcaugcacuaugcgcgaaugagaa

SEQ ID NO: 3458 - RNA, 37 nt, Artificial Sequence
  Description of Artificial Sequence:  Enzymatic Nucleic Acid
ccaaucugugauggcaugcacuaugcgcgagcaauga

SEQ ID NO: 3459 - RNA, 37 nt, Artificial Sequence
  Description of Artificial Sequence:  Enzymatic Nucleic Acid
agauuuguugauggcaugcacuaugcgcgaaggacua

SEQ ID NO: 3460 - RNA, 37 nt, Artificial Sequence
  Description of Artificial Sequence:  Enzymatic Nucleic Acid
uuaccaguugauggcaugcacuaugcgcggccaugcu

SEQ ID NO: 3461 - RNA, 37 nt, Artificial Sequence
  Description of Artificial Sequence:  Enzymatic Nucleic Acid
gauugaggugauggcaugcacuaugcgcggguuacca

SEQ ID NO: 3462 - RNA, 37 nt, Artificial Sequence
  Description of Artificial Sequence:  Enzymatic Nucleic Acid
gauucaguugauggcaugcacuaugcgcggauugagg

SEQ ID NO: 3463 - RNA, 37 nt, Artificial Sequence
  Description of Artificial Sequence:  Enzymatic Nucleic Acid
gcuugauuugauggcaugcacuaugcgcgagucgauu

SEQ ID NO: 3464 - RNA, 37 nt, Artificial Sequence
  Description of Artificial Sequence:  Enzymatic Nucleic Acid
gucugcagugauggcaugcacuaugcgcgaggaaaag

SEQ ID NO: 3465 - RNA, 37 nt, Artificial Sequence
  Description of Artificial Sequence:  Enzymatic Nucleic Acid
acugucugugauggcaugcacuaugcgcgagcaggaa

SEQ ID NO: 3466 - RNA, 37 nt, Artificial Sequence
  Description of Artificial Sequence:  Enzymatic Nucleic Acid
ccccagcuugauggcaugcacuaugcgcgaacugucu

SEQ ID NO: 3467 - RNA, 37 nt, Artificial Sequence
  Description of Artificial Sequence:  Enzymatic Nucleic Acid
ucaaauguugauggcaugcacuaugcgcgaccauccc

SEQ ID NO: 3468 - RNA, 37 nt, Artificial Sequence
  Description of Artificial Sequence:  Enzymatic Nucleic Acid
agcacuguugauggcaugcacuaugcgcgaaauguca

SEQ ID NO: 3469 - RNA, 37 nt, Artificial Sequence
  Description of Artificial Sequence:  Enzymatic Nucleic Acid
augggcagugauggcaugcacuaugcgcgacugucaa

SEQ ID NO: 3470 - RNA, 37 nt, Artificial Sequence
  Description of Artificial Sequence:  Enzymatic Nucleic Acid
uacaugggugauggcaugcacuaugcgcgagcacugu

SEQ ID NO: 3471 - RNA, 37 nt, Artificial Sequence
  Description of Artificial Sequence:  Enzymatic Nucleic Acid
uaugaguuugauggcaugcacuaugcgcgacuuugua

SEQ ID NO: 3472 - RNA, 37 nt, Artificial Sequence
  Description of Artificial Sequence:  Enzymatic Nucleic Acid
gucccuguugauggcaugcacuaugcgcgacugccac

SEQ ID NO: 3473 - RNA, 37 nt, Artificial Sequence
  Description of Artificial Sequence:  Enzymatic Nucleic Acid
ucuuuuggugauggcaugcacuaugcgcggagugugu

SEQ ID NO: 3474 - RNA, 37 nt, Artificial Sequence
  Description of Artificial Sequence:  Enzymatic Nucleic Acid
agcugcugugauggcaugcacuaugcgcgagguaauc

SEQ ID NO: 3475 - RNA, 37 nt, Artificial Sequence
  Description of Artificial Sequence:  Enzymatic Nucleic Acid
gcccgcugugauggcaugcacuaugcgcgagauggac

SEQ ID NO: 3476 - RNA, 37 nt, Artificial Sequence
  Description of Artificial Sequence:  Enzymatic Nucleic Acid
augccgauugauggcaugcacuaugcgcggaagcccg

SEQ ID NO: 3477 - RNA, 37 nt, Artificial Sequence
  Description of Artificial Sequence:  Enzymatic Nucleic Acid
uuccuaauugauggcaugcacuaugcgcgacaguaaa

SEQ ID NO: 3478 - RNA, 37 nt, Artificial Sequence
  Description of Artificial Sequence:  Enzymatic Nucleic Acid
agauccauugauggcaugcacuaugcgcgaguuggau

SEQ ID NO: 3479 - RNA, 37 nt, Artificial Sequence
  Description of Artificial Sequence:  Enzymatic Nucleic Acid
cacaauuuugauggcaugcacuaugcgcgagauccau

SEQ ID NO: 3480 - RNA, 37 nt, Artificial Sequence
  Description of Artificial Sequence:  Enzymatic Nucleic Acid
gucagcagugauggcaugcacuaugcgcgacaauuuc

SEQ ID NO: 3481 - RNA, 37 nt, Artificial Sequence
  Description of Artificial Sequence:  Enzymatic Nucleic Acid
uccgucagugauggcaugcacuaugcgcgagcacaau

SEQ ID NO: 3482 - RNA, 37 nt, Artificial Sequence
  Description of Artificial Sequence:  Enzymatic Nucleic Acid
ccauccguugauggcaugcacuaugcgcgagcagcac

SEQ ID NO: 3483 - RNA, 37 nt, Artificial Sequence
  Description of Artificial Sequence:  Enzymatic Nucleic Acid
cguuaaagugauggcaugcacuaugcgcgacccacuu

SEQ ID NO: 3484 - RNA, 37 nt, Artificial Sequence
  Description of Artificial Sequence:  Enzymatic Nucleic Acid
uuugaccuugauggcaugcacuaugcgcgguuaaagc

SEQ ID NO: 3485 - RNA, 37 nt, Artificial Sequence
  Description of Artificial Sequence:  Enzymatic Nucleic Acid
gaugauggugauggcaugcacuaugcgcgaccacuuu

SEQ ID NO: 3486 - RNA, 37 nt, Artificial Sequence
  Description of Artificial Sequence:  Enzymatic Nucleic Acid
ccccaaagugauggcaugcacuaugcgcggacugugu

SEQ ID NO: 3487 - RNA, 37 nt, Artificial Sequence
  Description of Artificial Sequence:  Enzymatic Nucleic Acid
uugagcugugauggcaugcacuaugcgcgagagggcc

SEQ ID NO: 3488 - RNA, 37 nt, Artificial Sequence
  Description of Artificial Sequence:  Enzymatic Nucleic Acid
ccuccuguugauggcaugcacuaugcgcgauuuugga

SEQ ID NO: 3489 - RNA, 37 nt, Artificial Sequence
  Description of Artificial Sequence:  Enzymatic Nucleic Acid
aucugaagugauggcaugcacuaugcgcgauaugucu

SEQ ID NO: 3490 - RNA, 37 nt, Artificial Sequence
  Description of Artificial Sequence:  Enzymatic Nucleic Acid
aaaagcauugauggcaugcacuaugcgcgaaugaggc

SEQ ID NO: 3491 - RNA, 37 nt, Artificial Sequence
  Description of Artificial Sequence:  Enzymatic Nucleic Acid
cccaaaagugauggcaugcacuaugcgcgaucaauga

SEQ ID NO: 3492 - RNA, 37 nt, Artificial Sequence
  Description of Artificial Sequence:  Enzymatic Nucleic Acid
ggauggagugauggcaugcacuaugcgcggcugagag

SEQ ID NO: 3493 - RNA, 37 nt, Artificial Sequence
  Description of Artificial Sequence:  Enzymatic Nucleic Acid
cuuacucuugauggcaugcacuaugcgcgaagcugga

SEQ ID NO: 3494 - RNA, 37 nt, Artificial Sequence
  Description of Artificial Sequence:  Enzymatic Nucleic Acid
gugccauuugauggcaugcacuaugcgcgauccacug

SEQ ID NO: 3495 - RNA, 37 nt, Artificial Sequence
  Description of Artificial Sequence:  Enzymatic Nucleic Acid
uccacgauugauggcaugcacuaugcgcgacugugcc

SEQ ID NO: 3496 - RNA, 37 nt, Artificial Sequence
  Description of Artificial Sequence:  Enzymatic Nucleic Acid
ggaggcugugauggcaugcacuaugcgcgguugucca

SEQ ID NO: 3497 - RNA, 37 nt, Artificial Sequence
  Description of Artificial Sequence:  Enzymatic Nucleic Acid
aaccuuagugauggcaugcacuaugcgcgaaugccug

SEQ ID NO: 3498 - RNA, 37 nt, Artificial Sequence
  Description of Artificial Sequence:  Enzymatic Nucleic Acid
cuugcuugugauggcaugcacuaugcgcgagacugua

SEQ ID NO: 3499 - RNA, 37 nt, Artificial Sequence
  Description of Artificial Sequence:  Enzymatic Nucleic Acid
gucaggguugauggcaugcacuaugcgcgaagguuug

SEQ ID NO: 3500 - RNA, 37 nt, Artificial Sequence
  Description of Artificial Sequence:  Enzymatic Nucleic Acid
gugacaguugauggcaugcacuaugcgcgagggucaa

SEQ ID NO: 3501 - RNA, 37 nt, Artificial Sequence
  Description of Artificial Sequence:  Enzymatic Nucleic Acid
auuggacgugauggcaugcacuaugcgcgacgggacg

SEQ ID NO: 3502 - RNA, 37 nt, Artificial Sequence
  Description of Artificial Sequence:  Enzymatic Nucleic Acid
caggguagugauggcaugcacuaugcgcgauuggacg

SEQ ID NO: 3503 - RNA, 37 nt, Artificial Sequence
  Description of Artificial Sequence:  Enzymatic Nucleic Acid
auuggaggugauggcaugcacuaugcgcgaggguagc

SEQ ID NO: 3504 - RNA, 37 nt, Artificial Sequence
  Description of Artificial Sequence:  Enzymatic Nucleic Acid
uuggaaguugauggcaugcacuaugcgcgacuguaau

SEQ ID NO: 3505 - RNA, 37 nt, Artificial Sequence
  Description of Artificial Sequence:  Enzymatic Nucleic Acid
uccuuguuugauggcaugcacuaugcgcgguuuugga

SEQ ID NO: 3506 - RNA, 37 nt, Artificial Sequence
  Description of Artificial Sequence:  Enzymatic Nucleic Acid
aauauuugugauggcaugcacuaugcgcgauaaacua

SEQ ID NO: 3507 - RNA, 37 nt, Artificial Sequence
  Description of Artificial Sequence:  Enzymatic Nucleic Acid
cuccuuggugauggcaugcacuaugcgcggaauauuu

SEQ ID NO: 3508 - RNA, 37 nt, Artificial Sequence
  Description of Artificial Sequence:  Enzymatic Nucleic Acid
gauucaauugauggcaugcacuaugcgcgagggcugu

SEQ ID NO: 3509 - RNA, 37 nt, Artificial Sequence
  Description of Artificial Sequence:  Enzymatic Nucleic Acid
cacugauuugauggcaugcacuaugcgcgaaucaggg

SEQ ID NO: 3510 - RNA, 37 nt, Artificial Sequence
  Description of Artificial Sequence:  Enzymatic Nucleic Acid
uuuccauuugauggcaugcacuaugcgcgacugauuc

SEQ ID NO: 3511 - RNA, 37 nt, Artificial Sequence
  Description of Artificial Sequence:  Enzymatic Nucleic Acid
agcaucagugauggcaugcacuaugcgcgaccugcuc

SEQ ID NO: 3512 - RNA, 37 nt, Artificial Sequence
  Description of Artificial Sequence:  Enzymatic Nucleic Acid
aguagcauugauggcaugcacuaugcgcgagcaccug

SEQ ID NO: 3513 - RNA, 37 nt, Artificial Sequence
  Description of Artificial Sequence:  Enzymatic Nucleic Acid
cuuaguagugauggcaugcacuaugcgcgaucagcac

SEQ ID NO: 3514 - RNA, 37 nt, Artificial Sequence
  Description of Artificial Sequence:  Enzymatic Nucleic Acid
gacaccguugauggcaugcacuaugcgcgauccuuag

SEQ ID NO: 3515 - RNA, 37 nt, Artificial Sequence
  Description of Artificial Sequence:  Enzymatic Nucleic Acid
auucguguugauggcaugcacuaugcgcgauaaguug

SEQ ID NO: 3516 - RNA, 37 nt, Artificial Sequence
  Description of Artificial Sequence:  Enzymatic Nucleic Acid
cuaccauuugauggcaugcacuaugcgcggugucaua

SEQ ID NO: 3517 - RNA, 37 nt, Artificial Sequence
  Description of Artificial Sequence:  Enzymatic Nucleic Acid
agagcccgugauggcaugcacuaugcgcgacuuuuac

SEQ ID NO: 3518 - RNA, 37 nt, Artificial Sequence
  Description of Artificial Sequence:  Enzymatic Nucleic Acid
ucuggcugugauggcaugcacuaugcgcgguuaacuc

SEQ ID NO: 3519 - RNA, 37 nt, Artificial Sequence
  Description of Artificial Sequence:  Enzymatic Nucleic Acid
ugggguauugauggcaugcacuaugcgcgacucuccg

SEQ ID NO: 3520 - RNA, 37 nt, Artificial Sequence
  Description of Artificial Sequence:  Enzymatic Nucleic Acid
aucauucuugauggcaugcacuaugcgcgaauccagc

SEQ ID NO: 3521 - RNA, 37 nt, Artificial Sequence
  Description of Artificial Sequence:  Enzymatic Nucleic Acid
uauuucauugauggcaugcacuaugcgcgauucucaa

SEQ ID NO: 3522 - RNA, 37 nt, Artificial Sequence
  Description of Artificial Sequence:  Enzymatic Nucleic Acid
uuguauuuugauggcaugcacuaugcgcgaucauucu

SEQ ID NO: 3523 - RNA, 37 nt, Artificial Sequence
  Description of Artificial Sequence:  Enzymatic Nucleic Acid
auuaauuuugauggcaugcacuaugcgcgaggucuug

SEQ ID NO: 3524 - RNA, 37 nt, Artificial Sequence
  Description of Artificial Sequence:  Enzymatic Nucleic Acid
uugaacauugauggcaugcacuaugcgcgauccuuau

SEQ ID NO: 3525 - RNA, 37 nt, Artificial Sequence
  Description of Artificial Sequence:  Enzymatic Nucleic Acid
ugggacauugauggcaugcacuaugcgcgagaagcca

SEQ ID NO: 3526 - RNA, 37 nt, Artificial Sequence
  Description of Artificial Sequence:  Enzymatic Nucleic Acid
uaugggagugauggcaugcacuaugcgcgauuuggga

SEQ ID NO: 3527 - RNA, 37 nt, Artificial Sequence
  Description of Artificial Sequence:  Enzymatic Nucleic Acid
gaagagauugauggcaugcacuaugcgcgagguaugg

SEQ ID NO: 3528 - RNA, 37 nt, Artificial Sequence
  Description of Artificial Sequence:  Enzymatic Nucleic Acid
cuucagguugauggcaugcacuaugcgcgggugauuu

SEQ ID NO: 3529 - RNA, 37 nt, Artificial Sequence
  Description of Artificial Sequence:  Enzymatic Nucleic Acid
uccgccuuugauggcaugcacuaugcgcgaggucggu

SEQ ID NO: 3530 - RNA, 37 nt, Artificial Sequence
  Description of Artificial Sequence:  Enzymatic Nucleic Acid
guccaaguugauggcaugcacuaugcgcgagauuaau

SEQ ID NO: 3531 - RNA, 37 nt, Artificial Sequence
  Description of Artificial Sequence:  Enzymatic Nucleic Acid
gucauaauugauggcaugcacuaugcgcgauccccag

SEQ ID NO: 3532 - RNA, 37 nt, Artificial Sequence
  Description of Artificial Sequence:  Enzymatic Nucleic Acid
uccaugguugauggcaugcacuaugcgcgauaaucau

SEQ ID NO: 3533 - RNA, 37 nt, Artificial Sequence
  Description of Artificial Sequence:  Enzymatic Nucleic Acid
uacuuauuugauggcaugcacuaugcgcggaaugaua

SEQ ID NO: 3534 - RNA, 37 nt, Artificial Sequence
  Description of Artificial Sequence:  Enzymatic Nucleic Acid
ucugagauugauggcaugcacuaugcgcgaagaauac

SEQ ID NO: 3535 - RNA, 37 nt, Artificial Sequence
  Description of Artificial Sequence:  Enzymatic Nucleic Acid
aagagauuugauggcaugcacuaugcgcgauugaacu

SEQ ID NO: 3536 - RNA, 37 nt, Artificial Sequence
  Description of Artificial Sequence:  Enzymatic Nucleic Acid
guaguauuugauggcaugcacuaugcgcgacuugaag

SEQ ID NO: 3537 - RNA, 37 nt, Artificial Sequence
  Description of Artificial Sequence:  Enzymatic Nucleic Acid
gaugagagugauggcaugcacuaugcgcgaguaguau

SEQ ID NO: 3538 - RNA, 37 nt, Artificial Sequence
  Description of Artificial Sequence:  Enzymatic Nucleic Acid
gacuuccuugauggcaugcacuaugcgcgagaguugg

SEQ ID NO: 3539 - RNA, 37 nt, Artificial Sequence
  Description of Artificial Sequence:  Enzymatic Nucleic Acid
gccauuuuugauggcaugcacuaugcgcgaaaaguaa

SEQ ID NO: 3540 - RNA, 37 nt, Artificial Sequence
  Description of Artificial Sequence:  Enzymatic Nucleic Acid
cugaauagugauggcaugcacuaugcgcgaaugaaaa

SEQ ID NO: 3541 - RNA, 37 nt, Artificial Sequence
  Description of Artificial Sequence:  Enzymatic Nucleic Acid
gaccuuauugauggcaugcacuaugcgcgaacagccu

SEQ ID NO: 3542 - RNA, 37 nt, Artificial Sequence
  Description of Artificial Sequence:  Enzymatic Nucleic Acid
uuucagauugauggcaugcacuaugcgcggaccuuau

SEQ ID NO: 3543 - RNA, 37 nt, Artificial Sequence
  Description of Artificial Sequence:  Enzymatic Nucleic Acid
ucugauuuugauggcaugcacuaugcgcgagaucgac

SEQ ID NO: 3544 - RNA, 37 nt, Artificial Sequence
  Description of Artificial Sequence:  Enzymatic Nucleic Acid
uacucgugugauggcaugcacuaugcgcgaauguugg

SEQ ID NO: 3545 - RNA, 37 nt, Artificial Sequence
  Description of Artificial Sequence:  Enzymatic Nucleic Acid
aagauacuugauggcaugcacuaugcgcggugcaaug

SEQ ID NO: 3546 - RNA, 37 nt, Artificial Sequence
  Description of Artificial Sequence:  Enzymatic Nucleic Acid
gucucuggugauggcaugcacuaugcgcgggagucug

SEQ ID NO: 3547 - RNA, 37 nt, Artificial Sequence
  Description of Artificial Sequence:  Enzymatic Nucleic Acid
cguuucauugauggcaugcacuaugcgcgaggacuag

SEQ ID NO: 3548 - RNA, 37 nt, Artificial Sequence
  Description of Artificial Sequence:  Enzymatic Nucleic Acid
agacguuuugauggcaugcacuaugcgcgaucaggac

SEQ ID NO: 3549 - RNA, 37 nt, Artificial Sequence
  Description of Artificial Sequence:  Enzymatic Nucleic Acid
acaaggagugauggcaugcacuaugcgcgagacguuu

SEQ ID NO: 3550 - RNA, 37 nt, Artificial Sequence
  Description of Artificial Sequence:  Enzymatic Nucleic Acid
gacagcugugauggcaugcacuaugcgcgaguucucc

SEQ ID NO: 3551 - RNA, 37 nt, Artificial Sequence
  Description of Artificial Sequence:  Enzymatic Nucleic Acid
caaaaauuugauggcaugcacuaugcgcgagcccuag

SEQ ID NO: 3552 - RNA, 37 nt, Artificial Sequence
  Description of Artificial Sequence:  Enzymatic Nucleic Acid
uuuauaauugauggcaugcacuaugcgcgaaaaaaag

SEQ ID NO: 3553 - RNA, 37 nt, Artificial Sequence
  Description of Artificial Sequence:  Enzymatic Nucleic Acid
uaguauauugauggcaugcacuaugcgcggcccccua

SEQ ID NO: 3554 - RNA, 37 nt, Artificial Sequence
  Description of Artificial Sequence:  Enzymatic Nucleic Acid
uauuuuauugauggcaugcacuaugcgcggcccccua

SEQ ID NO: 3555 - RNA, 37 nt, Artificial Sequence
  Description of Artificial Sequence:  Enzymatic Nucleic Acid
uuguuuagugauggcaugcacuaugcgcgauuuuauu

SEQ ID NO: 3556 - RNA, 37 nt, Artificial Sequence
  Description of Artificial Sequence:  Enzymatic Nucleic Acid
auauuccaugauggcaugcacuaugcgcgauccauuu

SEQ ID NO: 3557 - RNA, 37 nt, Artificial Sequence
  Description of Artificial Sequence:  Enzymatic Nucleic Acid
cccuuaaaugauggcaugcacuaugcgcgaagaaaau

SEQ ID NO: 3558 - RNA, 37 nt, Artificial Sequence
  Description of Artificial Sequence:  Enzymatic Nucleic Acid
aaccucaaugauggcaugcacuaugcgcgaccucuuc

SEQ ID NO: 3559 - RNA, 37 nt, Artificial Sequence
  Description of Artificial Sequence:  Enzymatic Nucleic Acid
augcuugaugauggcaugcacuaugcgcgauaaccuc

SEQ ID NO: 3560 - RNA, 37 nt, Artificial Sequence
  Description of Artificial Sequence:  Enzymatic Nucleic Acid
aaugauaaugauggcaugcacuaugcgcgaauaucuu

SEQ ID NO: 3561 - RNA, 37 nt, Artificial Sequence
  Description of Artificial Sequence:  Enzymatic Nucleic Acid
guuuaucaugauggcaugcacuaugcgcgaggucuuu

SEQ ID NO: 3562 - RNA, 37 nt, Artificial Sequence
  Description of Artificial Sequence:  Enzymatic Nucleic Acid
uauagacaugauggcaugcacuaugcgcgacguuucc

SEQ ID NO: 3563 - RNA, 37 nt, Artificial Sequence
  Description of Artificial Sequence:  Enzymatic Nucleic Acid
aauauagaugauggcaugcacuaugcgcgacacguuu

SEQ ID NO: 3564 - RNA, 37 nt, Artificial Sequence
  Description of Artificial Sequence:  Enzymatic Nucleic Acid
uauauauaugauggcaugcacuaugcgcgagauauga

SEQ ID NO: 3565 - RNA, 37 nt, Artificial Sequence
  Description of Artificial Sequence:  Enzymatic Nucleic Acid
uugcuguaugauggcaugcacuaugcgcgaucucccu

SEQ ID NO: 3566 - RNA, 37 nt, Artificial Sequence
  Description of Artificial Sequence:  Enzymatic Nucleic Acid
gaugaacaugauggcaugcacuaugcgcgagaacucu

SEQ ID NO: 3567 - RNA, 37 nt, Artificial Sequence
  Description of Artificial Sequence:  Enzymatic Nucleic Acid
aagaugaaugauggcaugcacuaugcgcgacagaacu

SEQ ID NO: 3568 - RNA, 37 nt, Artificial Sequence
  Description of Artificial Sequence:  Enzymatic Nucleic Acid
ugcaacgaugauggcaugcacuaugcgcgaaugccuu

SEQ ID NO: 3569 - RNA, 37 nt, Artificial Sequence
  Description of Artificial Sequence:  Enzymatic Nucleic Acid
uucuggcaugauggcaugcacuaugcgcgauuggggu

SEQ ID NO: 3570 - RNA, 37 nt, Artificial Sequence
  Description of Artificial Sequence:  Enzymatic Nucleic Acid
aacagauaugauggcaugcacuaugcgcgagagaugc

SEQ ID NO: 3571 - RNA, 37 nt, Artificial Sequence
  Description of Artificial Sequence:  Enzymatic Nucleic Acid
gcuucaaaugauggcaugcacuaugcgcgagauacag

SEQ ID NO: 3572 - RNA, 37 nt, Artificial Sequence
  Description of Artificial Sequence:  Enzymatic Nucleic Acid
aauggcaaugauggcaugcacuaugcgcgauuuuuga

SEQ ID NO: 3573 - RNA, 37 nt, Artificial Sequence
  Description of Artificial Sequence:  Enzymatic Nucleic Acid
uggucucaugauggcaugcacuaugcgcgauagucag

SEQ ID NO: 3574 - RNA, 37 nt, Artificial Sequence
  Description of Artificial Sequence:  Enzymatic Nucleic Acid
aaccagaaugauggcaugcacuaugcgcgaucagcau

SEQ ID NO: 3575 - RNA, 37 nt, Artificial Sequence
  Description of Artificial Sequence:  Enzymatic Nucleic Acid
ucucuccaugauggcaugcacuaugcgcgaguugccc

SEQ ID NO: 3576 - RNA, 37 nt, Artificial Sequence
  Description of Artificial Sequence:  Enzymatic Nucleic Acid
cucauggaugauggcaugcacuaugcgcgaaaugccu

SEQ ID NO: 3577 - RNA, 37 nt, Artificial Sequence
  Description of Artificial Sequence:  Enzymatic Nucleic Acid
cugcugaaugauggcaugcacuaugcgcgaucuuacu

SEQ ID NO: 3578 - RNA, 37 nt, Artificial Sequence
  Description of Artificial Sequence:  Enzymatic Nucleic Acid
cuuuacuaugauggcaugcacuaugcgcgauuuguac

SEQ ID NO: 3579 - RNA, 37 nt, Artificial Sequence
  Description of Artificial Sequence:  Enzymatic Nucleic Acid
cucccugaugauggcaugcacuaugcgcgacuucuuu

SEQ ID NO: 3580 - RNA, 37 nt, Artificial Sequence
  Description of Artificial Sequence:  Enzymatic Nucleic Acid
ugguguaaugauggcaugcacuaugcgcgagcugccu

SEQ ID NO: 3581 - RNA, 37 nt, Artificial Sequence
  Description of Artificial Sequence:  Enzymatic Nucleic Acid
caaacucaugauggcaugcacuaugcgcgauccuuuu

SEQ ID NO: 3582 - RNA, 37 nt, Artificial Sequence
  Description of Artificial Sequence:  Enzymatic Nucleic Acid
uuggagaaugauggcaugcacuaugcgcgaaacucac

SEQ ID NO: 3583 - RNA, 37 nt, Artificial Sequence
  Description of Artificial Sequence:  Enzymatic Nucleic Acid
ugugcaaaugauggcaugcacuaugcgcgauuauaga

SEQ ID NO: 3584 - RNA, 37 nt, Artificial Sequence
  Description of Artificial Sequence:  Enzymatic Nucleic Acid
agaaucaaugauggcaugcacuaugcgcgauguugug

SEQ ID NO: 3585 - RNA, 37 nt, Artificial Sequence
  Description of Artificial Sequence:  Enzymatic Nucleic Acid
guucuguaugauggcaugcacuaugcgcgagaauuca

SEQ ID NO: 3586 - RNA, 37 nt, Artificial Sequence
  Description of Artificial Sequence:  Enzymatic Nucleic Acid
uaaacacaugauggcaugcacuaugcgcgaauucuuu

SEQ ID NO: 3587 - RNA, 37 nt, Artificial Sequence
  Description of Artificial Sequence:  Enzymatic Nucleic Acid
acuaaacaugauggcaugcacuaugcgcgacaauucu

SEQ ID NO: 3588 - RNA, 37 nt, Artificial Sequence
  Description of Artificial Sequence:  Enzymatic Nucleic Acid
ggacuaaaugauggcaugcacuaugcgcgacacaauu

SEQ ID NO: 3589 - RNA, 37 nt, Artificial Sequence
  Description of Artificial Sequence:  Enzymatic Nucleic Acid
acuuuguaugauggcaugcacuaugcgcgaugggcag

SEQ ID NO: 3590 - RNA, 37 nt, Artificial Sequence
  Description of Artificial Sequence:  Enzymatic Nucleic Acid
ccuaaucaugauggcaugcacuaugcgcgaguaaaug

SEQ ID NO: 3591 - RNA, 37 nt, Artificial Sequence
  Description of Artificial Sequence:  Enzymatic Nucleic Acid
cagcagcaugauggcaugcacuaugcgcgaauuucag

SEQ ID NO: 3592 - RNA, 37 nt, Artificial Sequence
  Description of Artificial Sequence:  Enzymatic Nucleic Acid
auuuuggaugauggcaugcacuaugcgcgagcuccuc

SEQ ID NO: 3593 - RNA, 37 nt, Artificial Sequence
  Description of Artificial Sequence:  Enzymatic Nucleic Acid
cugagagaugauggcaugcacuaugcgcgagcuccau

SEQ ID NO: 3594 - RNA, 37 nt, Artificial Sequence
  Description of Artificial Sequence:  Enzymatic Nucleic Acid
auaagaaaugauggcaugcacuaugcgcgaaaguguc

SEQ ID NO: 3595 - RNA, 37 nt, Artificial Sequence
  Description of Artificial Sequence:  Enzymatic Nucleic Acid
guccacuaugauggcaugcacuaugcgcgaaagccac

SEQ ID NO: 3596 - RNA, 37 nt, Artificial Sequence
  Description of Artificial Sequence:  Enzymatic Nucleic Acid
ggacgugaugauggcaugcacuaugcgcgagucaggg

SEQ ID NO: 3597 - RNA, 37 nt, Artificial Sequence
  Description of Artificial Sequence:  Enzymatic Nucleic Acid
ggcugugaugauggcaugcacuaugcgcgacuggccc

SEQ ID NO: 3598 - RNA, 37 nt, Artificial Sequence
  Description of Artificial Sequence:  Enzymatic Nucleic Acid
ugaguagaugauggcaugcacuaugcgcgaccgucau

SEQ ID NO: 3599 - RNA, 37 nt, Artificial Sequence
  Description of Artificial Sequence:  Enzymatic Nucleic Acid
cacuuuuaugauggcaugcacuaugcgcgacuguauc

SEQ ID NO: 3600 - RNA, 37 nt, Artificial Sequence
  Description of Artificial Sequence:  Enzymatic Nucleic Acid
gguauguaugauggcaugcacuaugcgcgagugcucc

SEQ ID NO: 3601 - RNA, 37 nt, Artificial Sequence
  Description of Artificial Sequence:  Enzymatic Nucleic Acid
guguugaaugauggcaugcacuaugcgcgaucauccu

SEQ ID NO: 3602 - RNA, 37 nt, Artificial Sequence
  Description of Artificial Sequence:  Enzymatic Nucleic Acid
cugaaacaugauggcaugcacuaugcgcgacuugcuu

SEQ ID NO: 3603 - RNA, 37 nt, Artificial Sequence
  Description of Artificial Sequence:  Enzymatic Nucleic Acid
ugcugaaaugauggcaugcacuaugcgcgacacuugc

SEQ ID NO: 3604 - RNA, 37 nt, Artificial Sequence
  Description of Artificial Sequence:  Enzymatic Nucleic Acid
agaagccaugauggcaugcacuaugcgcgaaaugagc

SEQ ID NO: 3605 - RNA, 37 nt, Artificial Sequence
  Description of Artificial Sequence:  Enzymatic Nucleic Acid
auuugggaugauggcaugcacuaugcgcgaucagaag

SEQ ID NO: 3606 - RNA, 37 nt, Artificial Sequence
  Description of Artificial Sequence:  Enzymatic Nucleic Acid
gguuuaaaugauggcaugcacuaugcgcgaaaaagac

SEQ ID NO: 3607 - RNA, 37 nt, Artificial Sequence
  Description of Artificial Sequence:  Enzymatic Nucleic Acid
cuuaucaaugauggcaugcacuaugcgcgagccugaa

SEQ ID NO: 3608 - RNA, 37 nt, Artificial Sequence
  Description of Artificial Sequence:  Enzymatic Nucleic Acid
ggaauaaaugauggcaugcacuaugcgcgaaagauac

SEQ ID NO: 3609 - RNA, 37 nt, Artificial Sequence
  Description of Artificial Sequence:  Enzymatic Nucleic Acid
uauuaggaugauggcaugcacuaugcgcgaaggagca

SEQ ID NO: 3610 - RNA, 37 nt, Artificial Sequence
  Description of Artificial Sequence:  Enzymatic Nucleic Acid
cacuuccaugauggcaugcacuaugcgcgauaauuuu

SEQ ID NO: 3611 - RNA, 37 nt, Artificial Sequence
  Description of Artificial Sequence:  Enzymatic Nucleic Acid
gcuauugaugauggcaugcacuaugcgcgagcugcag

SEQ ID NO: 3612 - RNA, 37 nt, Artificial Sequence
  Description of Artificial Sequence:  Enzymatic Nucleic Acid
uuaucugaugauggcaugcacuaugcgcgaaaaauuc

SEQ ID NO: 3613 - RNA, 37 nt, Artificial Sequence
  Description of Artificial Sequence:  Enzymatic Nucleic Acid
cuaaaauaugauggcaugcacuaugcgcgauuuuaga

SEQ ID NO: 3614 - RNA, 37 nt, Artificial Sequence
  Description of Artificial Sequence:  Enzymatic Nucleic Acid
gcccccuaugauggcaugcacuaugcgcgaggaaguc

SEQ ID NO: 3615 - RNA, 37 nt, Artificial Sequence
  Description of Artificial Sequence:  Enzymatic Nucleic Acid
acuauauaugauggcaugcacuaugcgcgauuuagua

SEQ ID NO: 3616 - RNA, 37 nt, Artificial Sequence
  Description of Artificial Sequence:  Enzymatic Nucleic Acid
caggaauaugauggcaugcacuaugcgcgauuuagua

SEQ ID NO: 3617 - RNA, 37 nt, Artificial Sequence
  Description of Artificial Sequence:  Enzymatic Nucleic Acid
gcccccuaugauggcaugcacuaugcgcgaggaauac

SEQ ID NO: 3618 - RNA, 37 nt, Artificial Sequence
  Description of Artificial Sequence:  Enzymatic Nucleic Acid
cuaaaauaugauggcaugcacuaugcgcgauuuagua

SEQ ID NO: 3619 - RNA, 37 nt, Artificial Sequence
  Description of Artificial Sequence:  Enzymatic Nucleic Acid
ucaaauuggccgaaaggcgagugaggucuguacuugu

SEQ ID NO: 3620 - RNA, 37 nt, Artificial Sequence
  Description of Artificial Sequence:  Enzymatic Nucleic Acid
ggaaaauggccgaaaggcgagugaggucuggguuacg

SEQ ID NO: 3621 - RNA, 37 nt, Artificial Sequence
  Description of Artificial Sequence:  Enzymatic Nucleic Acid
gucgauuggccgaaaggcgagugaggucuaacgacaa

SEQ ID NO: 3622 - RNA, 37 nt, Artificial Sequence
  Description of Artificial Sequence:  Enzymatic Nucleic Acid
ucuucugggccgaaaggcgagugaggucuacauuggg

SEQ ID NO: 3623 - RNA, 37 nt, Artificial Sequence
  Description of Artificial Sequence:  Enzymatic Nucleic Acid
caaaaugggccgaaaggcgagugaggucuaacauuuu

SEQ ID NO: 3624 - RNA, 37 nt, Artificial Sequence
  Description of Artificial Sequence:  Enzymatic Nucleic Acid
aacaucaggccgaaaggcgagugaggucuauuuuugu

SEQ ID NO: 3625 - RNA, 37 nt, Artificial Sequence
  Description of Artificial Sequence:  Enzymatic Nucleic Acid
agacucaggccgaaaggcgagugaggucuaaccagaa

SEQ ID NO: 3626 - RNA, 37 nt, Artificial Sequence
  Description of Artificial Sequence:  Enzymatic Nucleic Acid
uuuuccuggccgaaaggcgagugaggucuaaugaaau

SEQ ID NO: 3627 - RNA, 37 nt, Artificial Sequence
  Description of Artificial Sequence:  Enzymatic Nucleic Acid
ugaauguggccgaaaggcgagugaggucuaucuuuug

SEQ ID NO: 3628 - RNA, 37 nt, Artificial Sequence
  Description of Artificial Sequence:  Enzymatic Nucleic Acid
ccgucugggccgaaaggcgagugaggucugggauugg

SEQ ID NO: 3629 - RNA, 37 nt, Artificial Sequence
  Description of Artificial Sequence:  Enzymatic Nucleic Acid
auguuguggccgaaaggcgagugaggucuaaacauua

SEQ ID NO: 3630 - RNA, 37 nt, Artificial Sequence
  Description of Artificial Sequence:  Enzymatic Nucleic Acid
ggagauuggccgaaaggcgagugaggucuauuuuuga

SEQ ID NO: 3631 - RNA, 37 nt, Artificial Sequence
  Description of Artificial Sequence:  Enzymatic Nucleic Acid
aucugcaggccgaaaggcgagugaggucuaaugagaa

SEQ ID NO: 3632 - RNA, 37 nt, Artificial Sequence
  Description of Artificial Sequence:  Enzymatic Nucleic Acid
ccaaucuggccgaaaggcgagugaggucuagcaauga

SEQ ID NO: 3633 - RNA, 37 nt, Artificial Sequence
  Description of Artificial Sequence:  Enzymatic Nucleic Acid
gauugagggccgaaaggcgagugaggucugguuacca

SEQ ID NO: 3634 - RNA, 37 nt, Artificial Sequence
  Description of Artificial Sequence:  Enzymatic Nucleic Acid
gucugcaggccgaaaggcgagugaggucuaggaaaag

SEQ ID NO: 3635 - RNA, 37 nt, Artificial Sequence
  Description of Artificial Sequence:  Enzymatic Nucleic Acid
acugucuggccgaaaggcgagugaggucuagcaggaa

SEQ ID NO: 3636 - RNA, 37 nt, Artificial Sequence
  Description of Artificial Sequence:  Enzymatic Nucleic Acid
augggcaggccgaaaggcgagugaggucuacugucaa

SEQ ID NO: 3637 - RNA, 37 nt, Artificial Sequence
  Description of Artificial Sequence:  Enzymatic Nucleic Acid
uacauggggccgaaaggcgagugaggucuagcacugu

SEQ ID NO: 3638 - RNA, 37 nt, Artificial Sequence
  Description of Artificial Sequence:  Enzymatic Nucleic Acid
ucuuuugggccgaaaggcgagugaggucugagugugu

SEQ ID NO: 3639 - RNA, 37 nt, Artificial Sequence
  Description of Artificial Sequence:  Enzymatic Nucleic Acid
agcugcuggccgaaaggcgagugaggucuagguaauc

SEQ ID NO: 3640 - RNA, 37 nt, Artificial Sequence
  Description of Artificial Sequence:  Enzymatic Nucleic Acid
gcccgcuggccgaaaggcgagugaggucuagauggac

SEQ ID NO: 3641 - RNA, 37 nt, Artificial Sequence
  Description of Artificial Sequence:  Enzymatic Nucleic Acid
gucagcaggccgaaaggcgagugaggucuacaauuuc

SEQ ID NO: 3642 - RNA, 37 nt, Artificial Sequence
  Description of Artificial Sequence:  Enzymatic Nucleic Acid
uccgucaggccgaaaggcgagugaggucuagcacaau

SEQ ID NO: 3643 - RNA, 37 nt, Artificial Sequence
  Description of Artificial Sequence:  Enzymatic Nucleic Acid
cguuaaaggccgaaaggcgagugaggucuacccacuu

SEQ ID NO: 3644 - RNA, 37 nt, Artificial Sequence
  Description of Artificial Sequence:  Enzymatic Nucleic Acid
gaugaugggccgaaaggcgagugaggucuaccacuuu

SEQ ID NO: 3645 - RNA, 37 nt, Artificial Sequence
  Description of Artificial Sequence:  Enzymatic Nucleic Acid
ccccaaaggccgaaaggcgagugaggucugacugugu

SEQ ID NO: 3646 - RNA, 37 nt, Artificial Sequence
  Description of Artificial Sequence:  Enzymatic Nucleic Acid
uugagcuggccgaaaggcgagugaggucuagagggcc

SEQ ID NO: 3647 - RNA, 37 nt, Artificial Sequence
  Description of Artificial Sequence:  Enzymatic Nucleic Acid
aucugaaggccgaaaggcgagugaggucuauaugucu

SEQ ID NO: 3648 - RNA, 37 nt, Artificial Sequence
  Description of Artificial Sequence:  Enzymatic Nucleic Acid
cccaaaaggccgaaaggcgagugaggucuaucaauga

SEQ ID NO: 3649 - RNA, 37 nt, Artificial Sequence
  Description of Artificial Sequence:  Enzymatic Nucleic Acid
ggauggaggccgaaaggcgagugaggucugcugagag

SEQ ID NO: 3650 - RNA, 37 nt, Artificial Sequence
  Description of Artificial Sequence:  Enzymatic Nucleic Acid
ggaggcuggccgaaaggcgagugaggucuguugucca

SEQ ID NO: 3651 - RNA, 37 nt, Artificial Sequence
  Description of Artificial Sequence:  Enzymatic Nucleic Acid
aaccuuaggccgaaaggcgagugaggucuaaugccug

SEQ ID NO: 3652 - RNA, 37 nt, Artificial Sequence
  Description of Artificial Sequence:  Enzymatic Nucleic Acid
cuugcuuggccgaaaggcgagugaggucuagacugua

SEQ ID NO: 3653 - RNA, 37 nt, Artificial Sequence
  Description of Artificial Sequence:  Enzymatic Nucleic Acid
auuggacggccgaaaggcgagugaggucuacgggacg

SEQ ID NO: 3654 - RNA, 37 nt, Artificial Sequence
  Description of Artificial Sequence:  Enzymatic Nucleic Acid
caggguaggccgaaaggcgagugaggucuauuggacg

SEQ ID NO: 3655 - RNA, 37 nt, Artificial Sequence
  Description of Artificial Sequence:  Enzymatic Nucleic Acid
auuggagggccgaaaggcgagugaggucuaggguagc

SEQ ID NO: 3656 - RNA, 37 nt, Artificial Sequence
  Description of Artificial Sequence:  Enzymatic Nucleic Acid
aauauuuggccgaaaggcgagugaggucuauaaacua

SEQ ID NO: 3657 - RNA, 37 nt, Artificial Sequence
  Description of Artificial Sequence:  Enzymatic Nucleic Acid
cuccuugggccgaaaggcgagugaggucugaauauuu

SEQ ID NO: 3658 - RNA, 37 nt, Artificial Sequence
  Description of Artificial Sequence:  Enzymatic Nucleic Acid
agcaucaggccgaaaggcgagugaggucuaccugcuc

SEQ ID NO: 3659 - RNA, 37 nt, Artificial Sequence
  Description of Artificial Sequence:  Enzymatic Nucleic Acid
cuuaguaggccgaaaggcgagugaggucuaucagcac

SEQ ID NO: 3660 - RNA, 37 nt, Artificial Sequence
  Description of Artificial Sequence:  Enzymatic Nucleic Acid
agagcccggccgaaaggcgagugaggucuacuuuuac

SEQ ID NO: 3661 - RNA, 37 nt, Artificial Sequence
  Description of Artificial Sequence:  Enzymatic Nucleic Acid
ucuggcuggccgaaaggcgagugaggucuguuaacuc

SEQ ID NO: 3662 - RNA, 37 nt, Artificial Sequence
  Description of Artificial Sequence:  Enzymatic Nucleic Acid
uaugggaggccgaaaggcgagugaggucuauuuggga

SEQ ID NO: 3663 - RNA, 37 nt, Artificial Sequence
  Description of Artificial Sequence:  Enzymatic Nucleic Acid
gaugagaggccgaaaggcgagugaggucuaguaguau

SEQ ID NO: 3664 - RNA, 37 nt, Artificial Sequence
  Description of Artificial Sequence:  Enzymatic Nucleic Acid
cugaauaggccgaaaggcgagugaggucuaaugaaaa

SEQ ID NO: 3665 - RNA, 37 nt, Artificial Sequence
  Description of Artificial Sequence:  Enzymatic Nucleic Acid
uacucguggccgaaaggcgagugaggucuaauguugg

SEQ ID NO: 3666 - RNA, 37 nt, Artificial Sequence
  Description of Artificial Sequence:  Enzymatic Nucleic Acid
gucucugggccgaaaggcgagugaggucuggagucug

SEQ ID NO: 3667 - RNA, 37 nt, Artificial Sequence
  Description of Artificial Sequence:  Enzymatic Nucleic Acid
acaaggaggccgaaaggcgagugaggucuagacguuu

SEQ ID NO: 3668 - RNA, 37 nt, Artificial Sequence
  Description of Artificial Sequence:  Enzymatic Nucleic Acid
gacagcuggccgaaaggcgagugaggucuaguucucc

SEQ ID NO: 3669 - RNA, 37 nt, Artificial Sequence
  Description of Artificial Sequence:  Enzymatic Nucleic Acid
uuguuuaggccgaaaggcgagugaggucuauuuuauu

SEQ ID NO: 3670 - RNA, 37 nt, Artificial Sequence
  Description of Artificial Sequence:  Enzymatic Nucleic Acid
auauuccagccgaaaggcgagugaggucuauccauuu

SEQ ID NO: 3671 - RNA, 37 nt, Artificial Sequence
  Description of Artificial Sequence:  Enzymatic Nucleic Acid
cccuuaaagccgaaaggcgagugaggucuaagaaaau

SEQ ID NO: 3672 - RNA, 37 nt, Artificial Sequence
  Description of Artificial Sequence:  Enzymatic Nucleic Acid
aaccucaagccgaaaggcgagugaggucuaccucuuc

SEQ ID NO: 3673 - RNA, 37 nt, Artificial Sequence
  Description of Artificial Sequence:  Enzymatic Nucleic Acid
augcuugagccgaaaggcgagugaggucuauaaccuc

SEQ ID NO: 3674 - RNA, 37 nt, Artificial Sequence
  Description of Artificial Sequence:  Enzymatic Nucleic Acid
aaugauaagccgaaaggcgagugaggucuaauaucuu

SEQ ID NO: 3675 - RNA, 37 nt, Artificial Sequence
  Description of Artificial Sequence:  Enzymatic Nucleic Acid
guuuaucagccgaaaggcgagugaggucuaggucuuu

SEQ ID NO: 3676 - RNA, 37 nt, Artificial Sequence
  Description of Artificial Sequence:  Enzymatic Nucleic Acid
uauagacagccgaaaggcgagugaggucuacguuucc

SEQ ID NO: 3677 - RNA, 37 nt, Artificial Sequence
  Description of Artificial Sequence:  Enzymatic Nucleic Acid
aauauagagccgaaaggcgagugaggucuacacguuu

SEQ ID NO: 3678 - RNA, 37 nt, Artificial Sequence
  Description of Artificial Sequence:  Enzymatic Nucleic Acid
uauauauagccgaaaggcgagugaggucuagauauga

SEQ ID NO: 3679 - RNA, 37 nt, Artificial Sequence
  Description of Artificial Sequence:  Enzymatic Nucleic Acid
uugcuguagccgaaaggcgagugaggucuaucucccu

SEQ ID NO: 3680 - RNA, 37 nt, Artificial Sequence
  Description of Artificial Sequence:  Enzymatic Nucleic Acid
gaugaacagccgaaaggcgagugaggucuagaacucu

SEQ ID NO: 3681 - RNA, 37 nt, Artificial Sequence
  Description of Artificial Sequence:  Enzymatic Nucleic Acid
aagaugaagccgaaaggcgagugaggucuacagaacu

SEQ ID NO: 3682 - RNA, 37 nt, Artificial Sequence
  Description of Artificial Sequence:  Enzymatic Nucleic Acid
ugcaacgagccgaaaggcgagugaggucuaaugccuu

SEQ ID NO: 3683 - RNA, 37 nt, Artificial Sequence
  Description of Artificial Sequence:  Enzymatic Nucleic Acid
uucuggcagccgaaaggcgagugaggucuauuggggu

SEQ ID NO: 3684 - RNA, 37 nt, Artificial Sequence
  Description of Artificial Sequence:  Enzymatic Nucleic Acid
aacagauagccgaaaggcgagugaggucuagagaugc

SEQ ID NO: 3685 - RNA, 37 nt, Artificial Sequence
  Description of Artificial Sequence:  Enzymatic Nucleic Acid
gcuucaaagccgaaaggcgagugaggucuagauacag

SEQ ID NO: 3686 - RNA, 37 nt, Artificial Sequence
  Description of Artificial Sequence:  Enzymatic Nucleic Acid
aauggcaagccgaaaggcgagugaggucuauuuuuga

SEQ ID NO: 3687 - RNA, 37 nt, Artificial Sequence
  Description of Artificial Sequence:  Enzymatic Nucleic Acid
uggucucagccgaaaggcgagugaggucuauagucag

SEQ ID NO: 3688 - RNA, 37 nt, Artificial Sequence
  Description of Artificial Sequence:  Enzymatic Nucleic Acid
aaccagaagccgaaaggcgagugaggucuaucagcau

SEQ ID NO: 3689 - RNA, 37 nt, Artificial Sequence
  Description of Artificial Sequence:  Enzymatic Nucleic Acid
ucucuccagccgaaaggcgagugaggucuaguugccc

SEQ ID NO: 3690 - RNA, 37 nt, Artificial Sequence
  Description of Artificial Sequence:  Enzymatic Nucleic Acid
cucauggagccgaaaggcgagugaggucuaaaugccu

SEQ ID NO: 3691 - RNA, 37 nt, Artificial Sequence
  Description of Artificial Sequence:  Enzymatic Nucleic Acid
cugcugaagccgaaaggcgagugaggucuaucuuacu

SEQ ID NO: 3692 - RNA, 37 nt, Artificial Sequence
  Description of Artificial Sequence:  Enzymatic Nucleic Acid
cuuuacuagccgaaaggcgagugaggucuauuuguac

SEQ ID NO: 3693 - RNA, 37 nt, Artificial Sequence
  Description of Artificial Sequence:  Enzymatic Nucleic Acid
cucccugagccgaaaggcgagugaggucuacuucuuu

SEQ ID NO: 3694 - RNA, 37 nt, Artificial Sequence
  Description of Artificial Sequence:  Enzymatic Nucleic Acid
ugguguaagccgaaaggcgagugaggucuagcugccu

SEQ ID NO: 3695 - RNA, 37 nt, Artificial Sequence
  Description of Artificial Sequence:  Enzymatic Nucleic Acid
caaacucagccgaaaggcgagugaggucuauccuuuu

SEQ ID NO: 3696 - RNA, 37 nt, Artificial Sequence
  Description of Artificial Sequence:  Enzymatic Nucleic Acid
uuggagaagccgaaaggcgagugaggucuaaacucac

SEQ ID NO: 3697 - RNA, 37 nt, Artificial Sequence
  Description of Artificial Sequence:  Enzymatic Nucleic Acid
ugugcaaagccgaaaggcgagugaggucuauuauaga

SEQ ID NO: 3698 - RNA, 37 nt, Artificial Sequence
  Description of Artificial Sequence:  Enzymatic Nucleic Acid
agaaucaagccgaaaggcgagugaggucuauguugug

SEQ ID NO: 3699 - RNA, 37 nt, Artificial Sequence
  Description of Artificial Sequence:  Enzymatic Nucleic Acid
guucuguagccgaaaggcgagugaggucuagaauuca

SEQ ID NO: 3700 - RNA, 37 nt, Artificial Sequence
  Description of Artificial Sequence:  Enzymatic Nucleic Acid
uaaacacagccgaaaggcgagugaggucuaauucuuu

SEQ ID NO: 3701 - RNA, 37 nt, Artificial Sequence
  Description of Artificial Sequence:  Enzymatic Nucleic Acid
acuaaacagccgaaaggcgagugaggucuacaauucu

SEQ ID NO: 3702 - RNA, 37 nt, Artificial Sequence
  Description of Artificial Sequence:  Enzymatic Nucleic Acid
ggacuaaagccgaaaggcgagugaggucuacacaauu

SEQ ID NO: 3703 - RNA, 37 nt, Artificial Sequence
  Description of Artificial Sequence:  Enzymatic Nucleic Acid
acuuuguagccgaaaggcgagugaggucuaugggcag

SEQ ID NO: 3704 - RNA, 37 nt, Artificial Sequence
  Description of Artificial Sequence:  Enzymatic Nucleic Acid
ccuaaucagccgaaaggcgagugaggucuaguaaaug

SEQ ID NO: 3705 - RNA, 37 nt, Artificial Sequence
  Description of Artificial Sequence:  Enzymatic Nucleic Acid
cagcagcagccgaaaggcgagugaggucuaauuucag

SEQ ID NO: 3706 - RNA, 37 nt, Artificial Sequence
  Description of Artificial Sequence:  Enzymatic Nucleic Acid
auuuuggagccgaaaggcgagugaggucuagcuccuc

SEQ ID NO: 3707 - RNA, 37 nt, Artificial Sequence
  Description of Artificial Sequence:  Enzymatic Nucleic Acid
cugagagagccgaaaggcgagugaggucuagcuccau

SEQ ID NO: 3708 - RNA, 37 nt, Artificial Sequence
  Description of Artificial Sequence:  Enzymatic Nucleic Acid
auaagaaagccgaaaggcgagugaggucuaaaguguc

SEQ ID NO: 3709 - RNA, 37 nt, Artificial Sequence
  Description of Artificial Sequence:  Enzymatic Nucleic Acid
guccacuagccgaaaggcgagugaggucuaaagccac

SEQ ID NO: 3710 - RNA, 37 nt, Artificial Sequence
  Description of Artificial Sequence:  Enzymatic Nucleic Acid
ggacgugagccgaaaggcgagugaggucuagucaggg

SEQ ID NO: 3711 - RNA, 37 nt, Artificial Sequence
  Description of Artificial Sequence:  Enzymatic Nucleic Acid
ggcugugagccgaaaggcgagugaggucuacuggccc

SEQ ID NO: 3712 - RNA, 37 nt, Artificial Sequence
  Description of Artificial Sequence:  Enzymatic Nucleic Acid
ugaguagagccgaaaggcgagugaggucuaccgucau

SEQ ID NO: 3713 - RNA, 37 nt, Artificial Sequence
  Description of Artificial Sequence:  Enzymatic Nucleic Acid
cacuuuuagccgaaaggcgagugaggucuacuguauc

SEQ ID NO: 3714 - RNA, 37 nt, Artificial Sequence
  Description of Artificial Sequence:  Enzymatic Nucleic Acid
gguauguagccgaaaggcgagugaggucuagugcucc

SEQ ID NO: 3715 - RNA, 37 nt, Artificial Sequence
  Description of Artificial Sequence:  Enzymatic Nucleic Acid
guguugaagccgaaaggcgagugaggucuaucauccu

SEQ ID NO: 3716 - RNA, 37 nt, Artificial Sequence
  Description of Artificial Sequence:  Enzymatic Nucleic Acid
cugaaacagccgaaaggcgagugaggucuacuugcuu

SEQ ID NO: 3717 - RNA, 37 nt, Artificial Sequence
  Description of Artificial Sequence:  Enzymatic Nucleic Acid
ugcugaaagccgaaaggcgagugaggucuacacuugc

SEQ ID NO: 3718 - RNA, 37 nt, Artificial Sequence
  Description of Artificial Sequence:  Enzymatic Nucleic Acid
agaagccagccgaaaggcgagugaggucuaaaugagc

SEQ ID NO: 3719 - RNA, 37 nt, Artificial Sequence
  Description of Artificial Sequence:  Enzymatic Nucleic Acid
auuugggagccgaaaggcgagugaggucuaucagaag

SEQ ID NO: 3720 - RNA, 37 nt, Artificial Sequence
  Description of Artificial Sequence:  Enzymatic Nucleic Acid
gguuuaaagccgaaaggcgagugaggucuaaaaagac

SEQ ID NO: 3721 - RNA, 37 nt, Artificial Sequence
  Description of Artificial Sequence:  Enzymatic Nucleic Acid
cuuaucaagccgaaaggcgagugaggucuagccugaa

SEQ ID NO: 3722 - RNA, 37 nt, Artificial Sequence
  Description of Artificial Sequence:  Enzymatic Nucleic Acid
ggaauaaagccgaaaggcgagugaggucuaaagauac

SEQ ID NO: 3723 - RNA, 37 nt, Artificial Sequence
  Description of Artificial Sequence:  Enzymatic Nucleic Acid
uauuaggagccgaaaggcgagugaggucuaaggagca

SEQ ID NO: 3724 - RNA, 37 nt, Artificial Sequence
  Description of Artificial Sequence:  Enzymatic Nucleic Acid
cacuuccagccgaaaggcgagugaggucuauaauuuu

SEQ ID NO: 3725 - RNA, 37 nt, Artificial Sequence
  Description of Artificial Sequence:  Enzymatic Nucleic Acid
gcuauugagccgaaaggcgagugaggucuagcugcag

SEQ ID NO: 3726 - RNA, 37 nt, Artificial Sequence
  Description of Artificial Sequence:  Enzymatic Nucleic Acid
uuaucugagccgaaaggcgagugaggucuaaaaauuc

SEQ ID NO: 3727 - RNA, 37 nt, Artificial Sequence
  Description of Artificial Sequence:  Enzymatic Nucleic Acid
cuaaaauagccgaaaggcgagugaggucuauuuuaga

SEQ ID NO: 3728 - RNA, 37 nt, Artificial Sequence
  Description of Artificial Sequence:  Enzymatic Nucleic Acid
gcccccuagccgaaaggcgagugaggucuaggaaguc

SEQ ID NO: 3729 - RNA, 37 nt, Artificial Sequence
  Description of Artificial Sequence:  Enzymatic Nucleic Acid
acuauauagccgaaaggcgagugaggucuauuuagua

SEQ ID NO: 3730 - RNA, 37 nt, Artificial Sequence
  Description of Artificial Sequence:  Enzymatic Nucleic Acid
caggaauagccgaaaggcgagugaggucuauuuagua

SEQ ID NO: 3731 - RNA, 37 nt, Artificial Sequence
  Description of Artificial Sequence:  Enzymatic Nucleic Acid
gcccccuagccgaaaggcgagugaggucuaggaauac

SEQ ID NO: 3732 - RNA, 37 nt, Artificial Sequence
  Description of Artificial Sequence:  Enzymatic Nucleic Acid
cuaaaauagccgaaaggcgagugaggucuauuuagua

SEQ ID NO: 3733 - RNA, 37 nt, Artificial Sequence
  Description of Artificial Sequence:  Enzymatic Nucleic Acid
cauuuguagccgaaaggcgagugaggucucaaaagca

SEQ ID NO: 3734 - RNA, 37 nt, Artificial Sequence
  Description of Artificial Sequence:  Enzymatic Nucleic Acid
ucuucauggccgaaaggcgagugaggucuuccccuua

SEQ ID NO: 3735 - RNA, 37 nt, Artificial Sequence
  Description of Artificial Sequence:  Enzymatic Nucleic Acid
ccucaacagccgaaaggcgagugaggucucucuucau

SEQ ID NO: 3736 - RNA, 37 nt, Artificial Sequence
  Description of Artificial Sequence:  Enzymatic Nucleic Acid
ugacauaagccgaaaggcgagugaggucucucaacac

SEQ ID NO: 3737 - RNA, 37 nt, Artificial Sequence
  Description of Artificial Sequence:  Enzymatic Nucleic Acid
gccagauggccgaaaggcgagugaggucuuugacaua

SEQ ID NO: 3738 - RNA, 37 nt, Artificial Sequence
  Description of Artificial Sequence:  Enzymatic Nucleic Acid
cagcuguggccgaaaggcgagugaggucucagaugcu

SEQ ID NO: 3739 - RNA, 37 nt, Artificial Sequence
  Description of Artificial Sequence:  Enzymatic Nucleic Acid
gccuucaggccgaaaggcgagugaggucuugugccag

SEQ ID NO: 3740 - RNA, 37 nt, Artificial Sequence
  Description of Artificial Sequence:  Enzymatic Nucleic Acid
uccaucuggccgaaaggcgagugaggucucuucagcu

SEQ ID NO: 3741 - RNA, 37 nt, Artificial Sequence
  Description of Artificial Sequence:  Enzymatic Nucleic Acid
auugcguagccgaaaggcgagugaggucuuuguaaau

SEQ ID NO: 3742 - RNA, 37 nt, Artificial Sequence
  Description of Artificial Sequence:  Enzymatic Nucleic Acid
uacuauuggccgaaaggcgagugaggucuucuugucu

SEQ ID NO: 3743 - RNA, 37 nt, Artificial Sequence
  Description of Artificial Sequence:  Enzymatic Nucleic Acid
guguuuuagccgaaaggcgagugaggucuuauugcuc

SEQ ID NO: 3744 - RNA, 37 nt, Artificial Sequence
  Description of Artificial Sequence:  Enzymatic Nucleic Acid
cccccugagccgaaaggcgagugaggucucugaugug

SEQ ID NO: 3745 - RNA, 37 nt, Artificial Sequence
  Description of Artificial Sequence:  Enzymatic Nucleic Acid
gucuuuaagccgaaaggcgagugaggucuccccugac

SEQ ID NO: 3746 - RNA, 37 nt, Artificial Sequence
  Description of Artificial Sequence:  Enzymatic Nucleic Acid
guuuccaagccgaaaggcgagugaggucuuuaucgga

SEQ ID NO: 3747 - RNA, 37 nt, Artificial Sequence
  Description of Artificial Sequence:  Enzymatic Nucleic Acid
uagacacagccgaaaggcgagugaggucuguuuccaa

SEQ ID NO: 3748 - RNA, 37 nt, Artificial Sequence
  Description of Artificial Sequence:  Enzymatic Nucleic Acid
uuucuuuagccgaaaggcgagugaggucucauuauau

SEQ ID NO: 3749 - RNA, 37 nt, Artificial Sequence
  Description of Artificial Sequence:  Enzymatic Nucleic Acid
gcggguuagccgaaaggcgagugaggucugaaggugu

SEQ ID NO: 3750 - RNA, 37 nt, Artificial Sequence
  Description of Artificial Sequence:  Enzymatic Nucleic Acid
ccccauuggccgaaaggcgagugaggucuuguacauc

SEQ ID NO: 3751 - RNA, 37 nt, Artificial Sequence
  Description of Artificial Sequence:  Enzymatic Nucleic Acid
uuaaaugggccgaaaggcgagugaggucucccauugc

SEQ ID NO: 3752 - RNA, 37 nt, Artificial Sequence
  Description of Artificial Sequence:  Enzymatic Nucleic Acid
acacagaagccgaaaggcgagugaggucuucuuaaau

SEQ ID NO: 3753 - RNA, 37 nt, Artificial Sequence
  Description of Artificial Sequence:  Enzymatic Nucleic Acid
acucaggggccgaaaggcgagugaggucucccuucua

SEQ ID NO: 3754 - RNA, 37 nt, Artificial Sequence
  Description of Artificial Sequence:  Enzymatic Nucleic Acid
gugaauuagccgaaaggcgagugaggucuucagggcc

SEQ ID NO: 3755 - RNA, 37 nt, Artificial Sequence
  Description of Artificial Sequence:  Enzymatic Nucleic Acid
uuguucaggccgaaaggcgagugaggucuugaaugag

SEQ ID NO: 3756 - RNA, 37 nt, Artificial Sequence
  Description of Artificial Sequence:  Enzymatic Nucleic Acid
cuucauaggccgaaaggcgagugaggucucauuguug

SEQ ID NO: 3757 - RNA, 37 nt, Artificial Sequence
  Description of Artificial Sequence:  Enzymatic Nucleic Acid
cgacaauggccgaaaggcgagugaggucucuucauag

SEQ ID NO: 3758 - RNA, 37 nt, Artificial Sequence
  Description of Artificial Sequence:  Enzymatic Nucleic Acid
gauugcaagccgaaaggcgagugaggucugacaaugc

SEQ ID NO: 3759 - RNA, 37 nt, Artificial Sequence
  Description of Artificial Sequence:  Enzymatic Nucleic Acid
cugggucagccgaaaggcgagugaggucucauguccu

SEQ ID NO: 3760 - RNA, 37 nt, Artificial Sequence
  Description of Artificial Sequence:  Enzymatic Nucleic Acid
cagagauggccgaaaggcgagugaggucucuggguca

SEQ ID NO: 3761 - RNA, 37 nt, Artificial Sequence
  Description of Artificial Sequence:  Enzymatic Nucleic Acid
uccuguaggccgaaaggcgagugaggucuuucaaaca

SEQ ID NO: 3762 - RNA, 37 nt, Artificial Sequence
  Description of Artificial Sequence:  Enzymatic Nucleic Acid
uaaaaucggccgaaaggcgagugaggucuuuuccugu

SEQ ID NO: 3763 - RNA, 37 nt, Artificial Sequence
  Description of Artificial Sequence:  Enzymatic Nucleic Acid
auagucaggccgaaaggcgagugaggucucuuugucu

SEQ ID NO: 3764 - RNA, 37 nt, Artificial Sequence
  Description of Artificial Sequence:  Enzymatic Nucleic Acid
cucagcaagccgaaaggcgagugaggucucagaacau

SEQ ID NO: 3765 - RNA, 37 nt, Artificial Sequence
  Description of Artificial Sequence:  Enzymatic Nucleic Acid
ggaguagagccgaaaggcgagugaggucuucagcaac

SEQ ID NO: 3766 - RNA, 37 nt, Artificial Sequence
  Description of Artificial Sequence:  Enzymatic Nucleic Acid
caucauuagccgaaaggcgagugaggucucuggagga

SEQ ID NO: 3767 - RNA, 37 nt, Artificial Sequence
  Description of Artificial Sequence:  Enzymatic Nucleic Acid
cccaucuggccgaaaggcgagugaggucuucagugua

SEQ ID NO: 3768 - RNA, 37 nt, Artificial Sequence
  Description of Artificial Sequence:  Enzymatic Nucleic Acid
cacaguuggccgaaaggcgagugaggucuccaucugc

SEQ ID NO: 3769 - RNA, 37 nt, Artificial Sequence
  Description of Artificial Sequence:  Enzymatic Nucleic Acid
uccuuucagccgaaaggcgagugaggucuccuucucu

SEQ ID NO: 3770 - RNA, 37 nt, Artificial Sequence
  Description of Artificial Sequence:  Enzymatic Nucleic Acid
ucagcuaagccgaaaggcgagugaggucuuuuuuucc

SEQ ID NO: 3771 - RNA, 37 nt, Artificial Sequence
  Description of Artificial Sequence:  Enzymatic Nucleic Acid
auauucaggccgaaaggcgagugaggucuuaacuuuu

SEQ ID NO: 3772 - RNA, 37 nt, Artificial Sequence
  Description of Artificial Sequence:  Enzymatic Nucleic Acid
augccuuagccgaaaggcgagugaggucucuuguggu

SEQ ID NO: 3773 - RNA, 37 nt, Artificial Sequence
  Description of Artificial Sequence:  Enzymatic Nucleic Acid
gacaaauggccgaaaggcgagugaggucucuuaccuu

SEQ ID NO: 3774 - RNA, 37 nt, Artificial Sequence
  Description of Artificial Sequence:  Enzymatic Nucleic Acid
ugagcccagccgaaaggcgagugaggucuucauggac

SEQ ID NO: 3775 - RNA, 37 nt, Artificial Sequence
  Description of Artificial Sequence:  Enzymatic Nucleic Acid
uagaugaggccgaaaggcgagugaggucuccacucau

SEQ ID NO: 3776 - RNA, 37 nt, Artificial Sequence
  Description of Artificial Sequence:  Enzymatic Nucleic Acid
gucaaauagccgaaaggcgagugaggucuuccccauc

SEQ ID NO: 3777 - RNA, 37 nt, Artificial Sequence
  Description of Artificial Sequence:  Enzymatic Nucleic Acid
uuauuguagccgaaaggcgagugaggucuucgucaaa

SEQ ID NO: 3778 - RNA, 37 nt, Artificial Sequence
  Description of Artificial Sequence:  Enzymatic Nucleic Acid
ucuuacuggccgaaaggcgagugaggucuuuguauuc

SEQ ID NO: 3779 - RNA, 37 nt, Artificial Sequence
  Description of Artificial Sequence:  Enzymatic Nucleic Acid
acaucuuagccgaaaggcgagugaggucuugcuugua

SEQ ID NO: 3780 - RNA, 37 nt, Artificial Sequence
  Description of Artificial Sequence:  Enzymatic Nucleic Acid
aauaccuggccgaaaggcgagugaggucuugaacauc

SEQ ID NO: 3781 - RNA, 37 nt, Artificial Sequence
  Description of Artificial Sequence:  Enzymatic Nucleic Acid
caguaauagccgaaaggcgagugaggucucugcugaa

SEQ ID NO: 3782 - RNA, 37 nt, Artificial Sequence
  Description of Artificial Sequence:  Enzymatic Nucleic Acid
cauuuguagccgaaaggcgagugaggucucaguaaua

SEQ ID NO: 3783 - RNA, 37 nt, Artificial Sequence
  Description of Artificial Sequence:  Enzymatic Nucleic Acid
cuucuuuagccgaaaggcgagugaggucuuacauuug

SEQ ID NO: 3784 - RNA, 37 nt, Artificial Sequence
  Description of Artificial Sequence:  Enzymatic Nucleic Acid
cccugacagccgaaaggcgagugaggucuuucuuuac

SEQ ID NO: 3785 - RNA, 37 nt, Artificial Sequence
  Description of Artificial Sequence:  Enzymatic Nucleic Acid
aacagcuggccgaaaggcgagugaggucucucccuga

SEQ ID NO: 3786 - RNA, 37 nt, Artificial Sequence
  Description of Artificial Sequence:  Enzymatic Nucleic Acid
uguaacaggccgaaaggcgagugaggucuugccuccc

SEQ ID NO: 3787 - RNA, 37 nt, Artificial Sequence
  Description of Artificial Sequence:  Enzymatic Nucleic Acid
uccuguaagccgaaaggcgagugaggucuuuuauuga

SEQ ID NO: 3788 - RNA, 37 nt, Artificial Sequence
  Description of Artificial Sequence:  Enzymatic Nucleic Acid
agaacaaagccgaaaggcgagugaggucuucacaucc

SEQ ID NO: 3789 - RNA, 37 nt, Artificial Sequence
  Description of Artificial Sequence:  Enzymatic Nucleic Acid
uauagaaggccgaaaggcgagugaggucucuucuccg

SEQ ID NO: 3790 - RNA, 37 nt, Artificial Sequence
  Description of Artificial Sequence:  Enzymatic Nucleic Acid
gaauucaagccgaaaggcgagugaggucuuauagaau

SEQ ID NO: 3791 - RNA, 37 nt, Artificial Sequence
  Description of Artificial Sequence:  Enzymatic Nucleic Acid
guuuggaggccgaaaggcgagugaggucuuucuuugu

SEQ ID NO: 3792 - RNA, 37 nt, Artificial Sequence
  Description of Artificial Sequence:  Enzymatic Nucleic Acid
ugauuuuggccgaaaggcgagugaggucuuuguuugg

SEQ ID NO: 3793 - RNA, 37 nt, Artificial Sequence
  Description of Artificial Sequence:  Enzymatic Nucleic Acid
cccauguggccgaaaggcgagugaggucuuucggaga

SEQ ID NO: 3794 - RNA, 37 nt, Artificial Sequence
  Description of Artificial Sequence:  Enzymatic Nucleic Acid
acggaucagccgaaaggcgagugaggucuuucccaug

SEQ ID NO: 3795 - RNA, 37 nt, Artificial Sequence
  Description of Artificial Sequence:  Enzymatic Nucleic Acid
cagaaucagccgaaaggcgagugaggucuggaucacu

SEQ ID NO: 3796 - RNA, 37 nt, Artificial Sequence
  Description of Artificial Sequence:  Enzymatic Nucleic Acid
uuuggugggccgaaaggcgagugaggucuuguguugu

SEQ ID NO: 3797 - RNA, 37 nt, Artificial Sequence
  Description of Artificial Sequence:  Enzymatic Nucleic Acid
gucaaggagccgaaaggcgagugaggucuuaaacaca

SEQ ID NO: 3798 - RNA, 37 nt, Artificial Sequence
  Description of Artificial Sequence:  Enzymatic Nucleic Acid
ucgccauggccgaaaggcgagugaggucuuuccagau

SEQ ID NO: 3799 - RNA, 37 nt, Artificial Sequence
  Description of Artificial Sequence:  Enzymatic Nucleic Acid
accagucggccgaaaggcgagugaggucucaugcuuc

SEQ ID NO: 3800 - RNA, 37 nt, Artificial Sequence
  Description of Artificial Sequence:  Enzymatic Nucleic Acid
ggcgguuagccgaaaggcgagugaggucucagucgcc

SEQ ID NO: 3801 - RNA, 37 nt, Artificial Sequence
  Description of Artificial Sequence:  Enzymatic Nucleic Acid
cuggccuggccgaaaggcgagugaggucuuugauuca

SEQ ID NO: 3802 - RNA, 37 nt, Artificial Sequence
  Description of Artificial Sequence:  Enzymatic Nucleic Acid
aaagcugggccgaaaggcgagugaggucucugcuuga

SEQ ID NO: 3803 - RNA, 37 nt, Artificial Sequence
  Description of Artificial Sequence:  Enzymatic Nucleic Acid
aggaaaaggccgaaaggcgagugaggucuuggccugc

SEQ ID NO: 3804 - RNA, 37 nt, Artificial Sequence
  Description of Artificial Sequence:  Enzymatic Nucleic Acid
cagcucaagccgaaaggcgagugaggucuugucugca

SEQ ID NO: 3805 - RNA, 37 nt, Artificial Sequence
  Description of Artificial Sequence:  Enzymatic Nucleic Acid
gaccccaggccgaaaggcgagugaggucuucaacugu

SEQ ID NO: 3806 - RNA, 37 nt, Artificial Sequence
  Description of Artificial Sequence:  Enzymatic Nucleic Acid
acccaggagccgaaaggcgagugaggucucccagcuc

SEQ ID NO: 3807 - RNA, 37 nt, Artificial Sequence
  Description of Artificial Sequence:  Enzymatic Nucleic Acid
caucccaagccgaaaggcgagugaggucuccaggacc

SEQ ID NO: 3808 - RNA, 37 nt, Artificial Sequence
  Description of Artificial Sequence:  Enzymatic Nucleic Acid
aaaugucagccgaaaggcgagugaggucucaucccaa

SEQ ID NO: 3809 - RNA, 37 nt, Artificial Sequence
  Description of Artificial Sequence:  Enzymatic Nucleic Acid
gggcagcagccgaaaggcgagugaggucuugucaaau

SEQ ID NO: 3810 - RNA, 37 nt, Artificial Sequence
  Description of Artificial Sequence:  Enzymatic Nucleic Acid
ugaguucagccgaaaggcgagugaggucuuuuguaca

SEQ ID NO: 3811 - RNA, 37 nt, Artificial Sequence
  Description of Artificial Sequence:  Enzymatic Nucleic Acid
cacugccagccgaaaggcgagugaggucuuguuuauc

SEQ ID NO: 3812 - RNA, 37 nt, Artificial Sequence
  Description of Artificial Sequence:  Enzymatic Nucleic Acid
ugucacuggccgaaaggcgagugaggucucacuguuu

SEQ ID NO: 3813 - RNA, 37 nt, Artificial Sequence
  Description of Artificial Sequence:  Enzymatic Nucleic Acid
cccugucagccgaaaggcgagugaggucuugccacug

SEQ ID NO: 3814 - RNA, 37 nt, Artificial Sequence
  Description of Artificial Sequence:  Enzymatic Nucleic Acid
ugaagcuggccgaaaggcgagugaggucuugcaggua

SEQ ID NO: 3815 - RNA, 37 nt, Artificial Sequence
  Description of Artificial Sequence:  Enzymatic Nucleic Acid
uccugaaggccgaaaggcgagugaggucuugcugcag

SEQ ID NO: 3816 - RNA, 37 nt, Artificial Sequence
  Description of Artificial Sequence:  Enzymatic Nucleic Acid
cagauggagccgaaaggcgagugaggucugucccucc

SEQ ID NO: 3817 - RNA, 37 nt, Artificial Sequence
  Description of Artificial Sequence:  Enzymatic Nucleic Acid
gaagcccggccgaaaggcgagugaggucuugcagaug

SEQ ID NO: 3818 - RNA, 37 nt, Artificial Sequence
  Description of Artificial Sequence:  Enzymatic Nucleic Acid
gaucgaaggccgaaaggcgagugaggucuccgcugca

SEQ ID NO: 3819 - RNA, 37 nt, Artificial Sequence
  Description of Artificial Sequence:  Enzymatic Nucleic Acid
aguaaauggccgaaaggcgagugaggucucgaucgaa

SEQ ID NO: 3820 - RNA, 37 nt, Artificial Sequence
  Description of Artificial Sequence:  Enzymatic Nucleic Acid
agcacccagccgaaaggcgagugaggucuuuauagug

SEQ ID NO: 3821 - RNA, 37 nt, Artificial Sequence
  Description of Artificial Sequence:  Enzymatic Nucleic Acid
uuaaagcagccgaaaggcgagugaggucuccacuuau

SEQ ID NO: 3822 - RNA, 37 nt, Artificial Sequence
  Description of Artificial Sequence:  Enzymatic Nucleic Acid
uuguuugagccgaaaggcgagugaggucucucguuaa

SEQ ID NO: 3823 - RNA, 37 nt, Artificial Sequence
  Description of Artificial Sequence:  Enzymatic Nucleic Acid
uggcaccagccgaaaggcgagugaggucuuuuguuug

SEQ ID NO: 3824 - RNA, 37 nt, Artificial Sequence
  Description of Artificial Sequence:  Enzymatic Nucleic Acid
ugauggcagccgaaaggcgagugaggucucacuuugu

SEQ ID NO: 3825 - RNA, 37 nt, Artificial Sequence
  Description of Artificial Sequence:  Enzymatic Nucleic Acid
caaagcgagccgaaaggcgagugaggucuugugugga

SEQ ID NO: 3826 - RNA, 37 nt, Artificial Sequence
  Description of Artificial Sequence:  Enzymatic Nucleic Acid
gcagaggggccgaaaggcgagugaggucucccaaagc

SEQ ID NO: 3827 - RNA, 37 nt, Artificial Sequence
  Description of Artificial Sequence:  Enzymatic Nucleic Acid
uucuugaggccgaaaggcgagugaggucuugcagagg

SEQ ID NO: 3828 - RNA, 37 nt, Artificial Sequence
  Description of Artificial Sequence:  Enzymatic Nucleic Acid
uuggacaggccgaaaggcgagugaggucuuccucuag

SEQ ID NO: 3829 - RNA, 37 nt, Artificial Sequence
  Description of Artificial Sequence:  Enzymatic Nucleic Acid
ucuguaaagccgaaaggcgagugaggucucuccuguc

SEQ ID NO: 3830 - RNA, 37 nt, Artificial Sequence
  Description of Artificial Sequence:  Enzymatic Nucleic Acid
guucugaagccgaaaggcgagugaggucuuugaucug

SEQ ID NO: 3831 - RNA, 37 nt, Artificial Sequence
  Description of Artificial Sequence:  Enzymatic Nucleic Acid
caaugagggccgaaaggcgagugaggucucauuguuc

SEQ ID NO: 3832 - RNA, 37 nt, Artificial Sequence
  Description of Artificial Sequence:  Enzymatic Nucleic Acid
ugaaaggggccgaaaggcgagugaggucucccaaaag

SEQ ID NO: 3833 - RNA, 37 nt, Artificial Sequence
  Description of Artificial Sequence:  Enzymatic Nucleic Acid
agagacaggccgaaaggcgagugaggucuuccauuuc

SEQ ID NO: 3834 - RNA, 37 nt, Artificial Sequence
  Description of Artificial Sequence:  Enzymatic Nucleic Acid
auggagcggccgaaaggcgagugaggucuugagagac

SEQ ID NO: 3835 - RNA, 37 nt, Artificial Sequence
  Description of Artificial Sequence:  Enzymatic Nucleic Acid
cucucaaggccgaaaggcgagugaggucuuggaugga

SEQ ID NO: 3836 - RNA, 37 nt, Artificial Sequence
  Description of Artificial Sequence:  Enzymatic Nucleic Acid
aucccuuagccgaaaggcgagugaggucuucucaagc

SEQ ID NO: 3837 - RNA, 37 nt, Artificial Sequence
  Description of Artificial Sequence:  Enzymatic Nucleic Acid
uccacugggccgaaaggcgagugaggucuuguucugg

SEQ ID NO: 3838 - RNA, 37 nt, Artificial Sequence
  Description of Artificial Sequence:  Enzymatic Nucleic Acid
uucauccagccgaaaggcgagugaggucuuggcuguu

SEQ ID NO: 3839 - RNA, 37 nt, Artificial Sequence
  Description of Artificial Sequence:  Enzymatic Nucleic Acid
ucacuguggccgaaaggcgagugaggucucauucauc

SEQ ID NO: 3840 - RNA, 37 nt, Artificial Sequence
  Description of Artificial Sequence:  Enzymatic Nucleic Acid
cacgaucagccgaaaggcgagugaggucuugugccau

SEQ ID NO: 3841 - RNA, 37 nt, Artificial Sequence
  Description of Artificial Sequence:  Enzymatic Nucleic Acid
gcuguccagccgaaaggcgagugaggucugaucacug

SEQ ID NO: 3842 - RNA, 37 nt, Artificial Sequence
  Description of Artificial Sequence:  Enzymatic Nucleic Acid
ccacgguggccgaaaggcgagugaggucuuguccacg

SEQ ID NO: 3843 - RNA, 37 nt, Artificial Sequence
  Description of Artificial Sequence:  Enzymatic Nucleic Acid
cuuucccagccgaaaggcgagugaggucuggugcugu

SEQ ID NO: 3844 - RNA, 37 nt, Artificial Sequence
  Description of Artificial Sequence:  Enzymatic Nucleic Acid
uggggagggccgaaaggcgagugaggucuugcguugu

SEQ ID NO: 3845 - RNA, 37 nt, Artificial Sequence
  Description of Artificial Sequence:  Enzymatic Nucleic Acid
ucuguccagccgaaaggcgagugaggucuugggaucc

SEQ ID NO: 3846 - RNA, 37 nt, Artificial Sequence
  Description of Artificial Sequence:  Enzymatic Nucleic Acid
ccaccuuggccgaaaggcgagugaggucuuucugucc

SEQ ID NO: 3847 - RNA, 37 nt, Artificial Sequence
  Description of Artificial Sequence:  Enzymatic Nucleic Acid
caaagccagccgaaaggcgagugaggucucuugcuuc

SEQ ID NO: 3848 - RNA, 37 nt, Artificial Sequence
  Description of Artificial Sequence:  Enzymatic Nucleic Acid
cuacaaaggccgaaaggcgagugaggucucaccuugc

SEQ ID NO: 3849 - RNA, 37 nt, Artificial Sequence
  Description of Artificial Sequence:  Enzymatic Nucleic Acid
uuuguccagccgaaaggcgagugaggucuuacaaagc

SEQ ID NO: 3850 - RNA, 37 nt, Artificial Sequence
  Description of Artificial Sequence:  Enzymatic Nucleic Acid
gagguagggccgaaaggcgagugaggucucauuuugg

SEQ ID NO: 3851 - RNA, 37 nt, Artificial Sequence
  Description of Artificial Sequence:  Enzymatic Nucleic Acid
uagcaauggccgaaaggcgagugaggucucugggauu

SEQ ID NO: 3852 - RNA, 37 nt, Artificial Sequence
  Description of Artificial Sequence:  Enzymatic Nucleic Acid
agugccaagccgaaaggcgagugaggucucuuagcaa

SEQ ID NO: 3853 - RNA, 37 nt, Artificial Sequence
  Description of Artificial Sequence:  Enzymatic Nucleic Acid
uccaaguggccgaaaggcgagugaggucucaaccuua

SEQ ID NO: 3854 - RNA, 37 nt, Artificial Sequence
  Description of Artificial Sequence:  Enzymatic Nucleic Acid
cuugcagagccgaaaggcgagugaggucuuguauuuc

SEQ ID NO: 3855 - RNA, 37 nt, Artificial Sequence
  Description of Artificial Sequence:  Enzymatic Nucleic Acid
ugagcuuggccgaaaggcgagugaggucuuugcagac

SEQ ID NO: 3856 - RNA, 37 nt, Artificial Sequence
  Description of Artificial Sequence:  Enzymatic Nucleic Acid
uuugugaggccgaaaggcgagugaggucuuugcuugc

SEQ ID NO: 3857 - RNA, 37 nt, Artificial Sequence
  Description of Artificial Sequence:  Enzymatic Nucleic Acid
gcacgggagccgaaaggcgagugaggucugugacagu

SEQ ID NO: 3858 - RNA, 37 nt, Artificial Sequence
  Description of Artificial Sequence:  Enzymatic Nucleic Acid
uggacgcagccgaaaggcgagugaggucugggacgug

SEQ ID NO: 3859 - RNA, 37 nt, Artificial Sequence
  Description of Artificial Sequence:  Enzymatic Nucleic Acid
gcauuggagccgaaaggcgagugaggucugcacggga

SEQ ID NO: 3860 - RNA, 37 nt, Artificial Sequence
  Description of Artificial Sequence:  Enzymatic Nucleic Acid
ggaagucagccgaaaggcgagugaggucuuguaauug

SEQ ID NO: 3861 - RNA, 37 nt, Artificial Sequence
  Description of Artificial Sequence:  Enzymatic Nucleic Acid
ggaauuuggccgaaaggcgagugaggucuuggugucc

SEQ ID NO: 3862 - RNA, 37 nt, Artificial Sequence
  Description of Artificial Sequence:  Enzymatic Nucleic Acid
ccagaggggccgaaaggcgagugaggucuuggggaau

SEQ ID NO: 3863 - RNA, 37 nt, Artificial Sequence
  Description of Artificial Sequence:  Enzymatic Nucleic Acid
auaaacuagccgaaaggcgagugaggucucagagggc

SEQ ID NO: 3864 - RNA, 37 nt, Artificial Sequence
  Description of Artificial Sequence:  Enzymatic Nucleic Acid
ugcauaaagccgaaaggcgagugaggucuuaccagag

SEQ ID NO: 3865 - RNA, 37 nt, Artificial Sequence
  Description of Artificial Sequence:  Enzymatic Nucleic Acid
uggggagggccgaaaggcgagugaggucuuccuuggc

SEQ ID NO: 3866 - RNA, 37 nt, Artificial Sequence
  Description of Artificial Sequence:  Enzymatic Nucleic Acid
gacacugggccgaaaggcgagugaggucuccugagaa

SEQ ID NO: 3867 - RNA, 37 nt, Artificial Sequence
  Description of Artificial Sequence:  Enzymatic Nucleic Acid
cugugacagccgaaaggcgagugaggucuuggcccug

SEQ ID NO: 3868 - RNA, 37 nt, Artificial Sequence
  Description of Artificial Sequence:  Enzymatic Nucleic Acid
aaucaggggccgaaaggcgagugaggucuugugacac

SEQ ID NO: 3869 - RNA, 37 nt, Artificial Sequence
  Description of Artificial Sequence:  Enzymatic Nucleic Acid
uccauucagccgaaaggcgagugaggucuugauucaa

SEQ ID NO: 3870 - RNA, 37 nt, Artificial Sequence
  Description of Artificial Sequence:  Enzymatic Nucleic Acid
caagguaagccgaaaggcgagugaggucuuguuuuuc

SEQ ID NO: 3871 - RNA, 37 nt, Artificial Sequence
  Description of Artificial Sequence:  Enzymatic Nucleic Acid
agcaccuggccgaaaggcgagugaggucuuccauuau

SEQ ID NO: 3872 - RNA, 37 nt, Artificial Sequence
  Description of Artificial Sequence:  Enzymatic Nucleic Acid
caucagcagccgaaaggcgagugaggucucugcucca

SEQ ID NO: 3873 - RNA, 37 nt, Artificial Sequence
  Description of Artificial Sequence:  Enzymatic Nucleic Acid
aguagacagccgaaaggcgagugaggucucgucaucc

SEQ ID NO: 3874 - RNA, 37 nt, Artificial Sequence
  Description of Artificial Sequence:  Enzymatic Nucleic Acid
gugaaauagccgaaaggcgagugaggucucuugagua

SEQ ID NO: 3875 - RNA, 37 nt, Artificial Sequence
  Description of Artificial Sequence:  Enzymatic Nucleic Acid
uguaucuagccgaaaggcgagugaggucucauucgug

SEQ ID NO: 3876 - RNA, 37 nt, Artificial Sequence
  Description of Artificial Sequence:  Enzymatic Nucleic Acid
cuuuuacagccgaaaggcgagugaggucuuguaucua

SEQ ID NO: 3877 - RNA, 37 nt, Artificial Sequence
  Description of Artificial Sequence:  Enzymatic Nucleic Acid
agcccgcagccgaaaggcgagugaggucuuuuuacac

SEQ ID NO: 3878 - RNA, 37 nt, Artificial Sequence
  Description of Artificial Sequence:  Enzymatic Nucleic Acid
ucccagaggccgaaaggcgagugaggucuccgcacuu

SEQ ID NO: 3879 - RNA, 37 nt, Artificial Sequence
  Description of Artificial Sequence:  Enzymatic Nucleic Acid
ugcguuaagccgaaaggcgagugaggucuuccuccca

SEQ ID NO: 3880 - RNA, 37 nt, Artificial Sequence
  Description of Artificial Sequence:  Enzymatic Nucleic Acid
ccgucugggccgaaaggcgagugaggucuugcguuaa

SEQ ID NO: 3881 - RNA, 37 nt, Artificial Sequence
  Description of Artificial Sequence:  Enzymatic Nucleic Acid
ggguaucagccgaaaggcgagugaggucuucuccguc

SEQ ID NO: 3882 - RNA, 37 nt, Artificial Sequence
  Description of Artificial Sequence:  Enzymatic Nucleic Acid
ccacucuggccgaaaggcgagugaggucuugggguau

SEQ ID NO: 3883 - RNA, 37 nt, Artificial Sequence
  Description of Artificial Sequence:  Enzymatic Nucleic Acid
gugcuccagccgaaaggcgagugaggucuucugcugg

SEQ ID NO: 3884 - RNA, 37 nt, Artificial Sequence
  Description of Artificial Sequence:  Enzymatic Nucleic Acid
guacaguggccgaaaggcgagugaggucuuccacucu

SEQ ID NO: 3885 - RNA, 37 nt, Artificial Sequence
  Description of Artificial Sequence:  Enzymatic Nucleic Acid
caauccaggccgaaaggcgagugaggucucagguaug

SEQ ID NO: 3886 - RNA, 37 nt, Artificial Sequence
  Description of Artificial Sequence:  Enzymatic Nucleic Acid
cacacuuggccgaaaggcgagugaggucuuuguguug

SEQ ID NO: 3887 - RNA, 37 nt, Artificial Sequence
  Description of Artificial Sequence:  Enzymatic Nucleic Acid
gaaacacagccgaaaggcgagugaggucuuugcuugu

SEQ ID NO: 3888 - RNA, 37 nt, Artificial Sequence
  Description of Artificial Sequence:  Enzymatic Nucleic Acid
auguucuggccgaaaggcgagugaggucuugaaacac

SEQ ID NO: 3889 - RNA, 37 nt, Artificial Sequence
  Description of Artificial Sequence:  Enzymatic Nucleic Acid
caaaugaggccgaaaggcgagugaggucucucccgag

SEQ ID NO: 3890 - RNA, 37 nt, Artificial Sequence
  Description of Artificial Sequence:  Enzymatic Nucleic Acid
aucagaaggccgaaaggcgagugaggucucacaaaug

SEQ ID NO: 3891 - RNA, 37 nt, Artificial Sequence
  Description of Artificial Sequence:  Enzymatic Nucleic Acid
ugauuugggccgaaaggcgagugaggucucagguggg

SEQ ID NO: 3892 - RNA, 37 nt, Artificial Sequence
  Description of Artificial Sequence:  Enzymatic Nucleic Acid
aauuuccggccgaaaggcgagugaggucucuucaggu

SEQ ID NO: 3893 - RNA, 37 nt, Artificial Sequence
  Description of Artificial Sequence:  Enzymatic Nucleic Acid
ugagacuggccgaaaggcgagugaggucuccccguga

SEQ ID NO: 3894 - RNA, 37 nt, Artificial Sequence
  Description of Artificial Sequence:  Enzymatic Nucleic Acid
uaaugagagccgaaaggcgagugaggucuugcccccg

SEQ ID NO: 3895 - RNA, 37 nt, Artificial Sequence
  Description of Artificial Sequence:  Enzymatic Nucleic Acid
cccaggaggccgaaaggcgagugaggucuuguccaag

SEQ ID NO: 3896 - RNA, 37 nt, Artificial Sequence
  Description of Artificial Sequence:  Enzymatic Nucleic Acid
cuugugaggccgaaaggcgagugaggucuuguuccau

SEQ ID NO: 3897 - RNA, 37 nt, Artificial Sequence
  Description of Artificial Sequence:  Enzymatic Nucleic Acid
augauauagccgaaaggcgagugaggucuuugugagc

SEQ ID NO: 3898 - RNA, 37 nt, Artificial Sequence
  Description of Artificial Sequence:  Enzymatic Nucleic Acid
uacuuguagccgaaaggcgagugaggucuuuauucga

SEQ ID NO: 3899 - RNA, 37 nt, Artificial Sequence
  Description of Artificial Sequence:  Enzymatic Nucleic Acid
caagaauagccgaaaggcgagugaggucuuuguacuu

SEQ ID NO: 3900 - RNA, 37 nt, Artificial Sequence
  Description of Artificial Sequence:  Enzymatic Nucleic Acid
ucauugaagccgaaaggcgagugaggucuuugucucu

SEQ ID NO: 3901 - RNA, 37 nt, Artificial Sequence
  Description of Artificial Sequence:  Enzymatic Nucleic Acid
aguauucagccgaaaggcgagugaggucuuugaagag

SEQ ID NO: 3902 - RNA, 37 nt, Artificial Sequence
  Description of Artificial Sequence:  Enzymatic Nucleic Acid
agaguugggccgaaaggcgagugaggucuuuccuuug

SEQ ID NO: 3903 - RNA, 37 nt, Artificial Sequence
  Description of Artificial Sequence:  Enzymatic Nucleic Acid
caaaaagagccgaaaggcgagugaggucuuuccucag

SEQ ID NO: 3904 - RNA, 37 nt, Artificial Sequence
  Description of Artificial Sequence:  Enzymatic Nucleic Acid
gaucuguggccgaaaggcgagugaggucucauuuuca

SEQ ID NO: 3905 - RNA, 37 nt, Artificial Sequence
  Description of Artificial Sequence:  Enzymatic Nucleic Acid
aucaacaggccgaaaggcgagugaggucucugaauag

SEQ ID NO: 3906 - RNA, 37 nt, Artificial Sequence
  Description of Artificial Sequence:  Enzymatic Nucleic Acid
cagaucgagccgaaaggcgagugaggucucuuaucaa

SEQ ID NO: 3907 - RNA, 37 nt, Artificial Sequence
  Description of Artificial Sequence:  Enzymatic Nucleic Acid
caaagauagccgaaaggcgagugaggucuucgugcaa

SEQ ID NO: 3908 - RNA, 37 nt, Artificial Sequence
  Description of Artificial Sequence:  Enzymatic Nucleic Acid
caucaggagccgaaaggcgagugaggucuuagguguc

SEQ ID NO: 3909 - RNA, 37 nt, Artificial Sequence
  Description of Artificial Sequence:  Enzymatic Nucleic Acid
ggagcagagccgaaaggcgagugaggucuguuucauc

SEQ ID NO: 3910 - RNA, 37 nt, Artificial Sequence
  Description of Artificial Sequence:  Enzymatic Nucleic Acid
gaaugguggccgaaaggcgagugaggucuuguugaua

SEQ ID NO: 3911 - RNA, 37 nt, Artificial Sequence
  Description of Artificial Sequence:  Enzymatic Nucleic Acid
ugugaauggccgaaaggcgagugaggucucaggaaug

SEQ ID NO: 3912 - RNA, 37 nt, Artificial Sequence
  Description of Artificial Sequence:  Enzymatic Nucleic Acid
ccuauccagccgaaaggcgagugaggucuuuccacau

SEQ ID NO: 3913 - RNA, 37 nt, Artificial Sequence
  Description of Artificial Sequence:  Enzymatic Nucleic Acid
auugacaggccgaaaggcgagugaggucuugcaguuc

SEQ ID NO: 3914 - RNA, 37 nt, Artificial Sequence
  Description of Artificial Sequence:  Enzymatic Nucleic Acid
gcccuagggccgaaaggcgagugaggucuuauugaca

SEQ ID NO: 3915 - RNA, 37 nt, Artificial Sequence
  Description of Artificial Sequence:  Enzymatic Nucleic Acid
aaauucaggccgaaaggcgagugaggucuccuaggcu

SEQ ID NO: 3916 - RNA, 37 nt, Artificial Sequence
  Description of Artificial Sequence:  Enzymatic Nucleic Acid
guauaucggccgaaaggcgagugaggucuccccuaca

SEQ ID NO: 3917 - RNA, 37 nt, Artificial Sequence
  Description of Artificial Sequence:  Enzymatic Nucleic Acid
uaaauguagccgaaaggcgagugaggucuuauauaca

SEQ ID NO: 3918 - RNA, 37 nt, Artificial Sequence
  Description of Artificial Sequence:  Enzymatic Nucleic Acid
uuuuaucggccgaaaggcgagugaggucuccccuaca

SEQ ID NO: 3919 - DNA, 31 bp, Artificial Sequence
  Description of Artificial Sequence:  Enzymatic Nucleic Acid
tccatttgggctagctacaacgaaccaaaag

SEQ ID NO: 3920 - DNA, 31 bp, Artificial Sequence
  Description of Artificial Sequence:  Enzymatic Nucleic Acid
ttcaattaggctagctacaacgaattccaca

SEQ ID NO: 3921 - DNA, 31 bp, Artificial Sequence
  Description of Artificial Sequence:  Enzymatic Nucleic Acid
caagaaaaggctagctacaacgaattcaatt

SEQ ID NO: 3922 - DNA, 31 bp, Artificial Sequence
  Description of Artificial Sequence:  Enzymatic Nucleic Acid
gcttgacaggctagctacaacgaaacctcaa

SEQ ID NO: 3923 - DNA, 31 bp, Artificial Sequence
  Description of Artificial Sequence:  Enzymatic Nucleic Acid
cttgtaaaggctagctacaacgaatttccat

SEQ ID NO: 3924 - DNA, 31 bp, Artificial Sequence
  Description of Artificial Sequence:  Enzymatic Nucleic Acid
cgtacttgggctagctacaacgaaaatattt

SEQ ID NO: 3925 - DNA, 31 bp, Artificial Sequence
  Description of Artificial Sequence:  Enzymatic Nucleic Acid
aaattgcgggctagctacaacgaacttgtaa

SEQ ID NO: 3926 - DNA, 31 bp, Artificial Sequence
  Description of Artificial Sequence:  Enzymatic Nucleic Acid
gataacaaggctagctacaacgaatcttagt

SEQ ID NO: 3927 - DNA, 31 bp, Artificial Sequence
  Description of Artificial Sequence:  Enzymatic Nucleic Acid
gagaatgaggctagctacaacgaaacaatat

SEQ ID NO: 3928 - DNA, 31 bp, Artificial Sequence
  Description of Artificial Sequence:  Enzymatic Nucleic Acid
gtcttcaaggctagctacaacgaaggagaat

SEQ ID NO: 3929 - DNA, 31 bp, Artificial Sequence
  Description of Artificial Sequence:  Enzymatic Nucleic Acid
tgaaaataggctagctacaacgaagacacac

SEQ ID NO: 3930 - DNA, 31 bp, Artificial Sequence
  Description of Artificial Sequence:  Enzymatic Nucleic Acid
tatgaaaaggctagctacaacgaatagacac

SEQ ID NO: 3931 - DNA, 31 bp, Artificial Sequence
  Description of Artificial Sequence:  Enzymatic Nucleic Acid
tatacagaggctagctacaacgaatgaaaat

SEQ ID NO: 3932 - DNA, 31 bp, Artificial Sequence
  Description of Artificial Sequence:  Enzymatic Nucleic Acid
tatatataggctagctacaacgaacagatat

SEQ ID NO: 3933 - DNA, 31 bp, Artificial Sequence
  Description of Artificial Sequence:  Enzymatic Nucleic Acid
attatataggctagctacaacgaatacagat

SEQ ID NO: 3934 - DNA, 31 bp, Artificial Sequence
  Description of Artificial Sequence:  Enzymatic Nucleic Acid
ccattataggctagctacaacgaatatacag

SEQ ID NO: 3935 - DNA, 31 bp, Artificial Sequence
  Description of Artificial Sequence:  Enzymatic Nucleic Acid
taccattaggctagctacaacgaatatatac

SEQ ID NO: 3936 - DNA, 31 bp, Artificial Sequence
  Description of Artificial Sequence:  Enzymatic Nucleic Acid
cattgctgggctagctacaacgaacatctcc

SEQ ID NO: 3937 - DNA, 31 bp, Artificial Sequence
  Description of Artificial Sequence:  Enzymatic Nucleic Acid
tgccttcaggctagctacaacgaagccattg

SEQ ID NO: 3938 - DNA, 31 bp, Artificial Sequence
  Description of Artificial Sequence:  Enzymatic Nucleic Acid
caaacagaggctagctacaacgaacagagat

SEQ ID NO: 3939 - DNA, 31 bp, Artificial Sequence
  Description of Artificial Sequence:  Enzymatic Nucleic Acid
ctttcctgggctagctacaacgaagcttcaa

SEQ ID NO: 3940 - DNA, 31 bp, Artificial Sequence
  Description of Artificial Sequence:  Enzymatic Nucleic Acid
ttttgaaaggctagctacaacgaaaaatcgc

SEQ ID NO: 3941 - DNA, 31 bp, Artificial Sequence
  Description of Artificial Sequence:  Enzymatic Nucleic Acid
gtctcacaggctagctacaacgaagtcagcc

SEQ ID NO: 3942 - DNA, 31 bp, Artificial Sequence
  Description of Artificial Sequence:  Enzymatic Nucleic Acid
catttttgggctagctacaacgaaggtctca

SEQ ID NO: 3943 - DNA, 31 bp, Artificial Sequence
  Description of Artificial Sequence:  Enzymatic Nucleic Acid
tggaggagggctagctacaacgaagactcag

SEQ ID NO: 3944 - DNA, 31 bp, Artificial Sequence
  Description of Artificial Sequence:  Enzymatic Nucleic Acid
gctcagtgggctagctacaacgaagggttca

SEQ ID NO: 3945 - DNA, 31 bp, Artificial Sequence
  Description of Artificial Sequence:  Enzymatic Nucleic Acid
gtggtccaggctagctacaacgaattcagct

SEQ ID NO: 3946 - DNA, 31 bp, Artificial Sequence
  Description of Artificial Sequence:  Enzymatic Nucleic Acid
ccccatcgggctagctacaacgaagatgagc

SEQ ID NO: 3947 - DNA, 31 bp, Artificial Sequence
  Description of Artificial Sequence:  Enzymatic Nucleic Acid
tcgtcaaaggctagctacaacgaactcccca

SEQ ID NO: 3948 - DNA, 31 bp, Artificial Sequence
  Description of Artificial Sequence:  Enzymatic Nucleic Acid
cattattgggctagctacaacgaactcgtca

SEQ ID NO: 3949 - DNA, 31 bp, Artificial Sequence
  Description of Artificial Sequence:  Enzymatic Nucleic Acid
tggataagggctagctacaacgaagaatttc

SEQ ID NO: 3950 - DNA, 31 bp, Artificial Sequence
  Description of Artificial Sequence:  Enzymatic Nucleic Acid
ccattggaggctagctacaacgaaagtagaa

SEQ ID NO: 3951 - DNA, 31 bp, Artificial Sequence
  Description of Artificial Sequence:  Enzymatic Nucleic Acid
actgcttgggctagctacaacgaattcttcc

SEQ ID NO: 3952 - DNA, 31 bp, Artificial Sequence
  Description of Artificial Sequence:  Enzymatic Nucleic Acid
accagtaaggctagctacaacgaacctgctg

SEQ ID NO: 3953 - DNA, 31 bp, Artificial Sequence
  Description of Artificial Sequence:  Enzymatic Nucleic Acid
tgtaccagggctagctacaacgaaatacctg

SEQ ID NO: 3954 - DNA, 31 bp, Artificial Sequence
  Description of Artificial Sequence:  Enzymatic Nucleic Acid
tacatttgggctagctacaacgaaccagtaa

SEQ ID NO: 3955 - DNA, 31 bp, Artificial Sequence
  Description of Artificial Sequence:  Enzymatic Nucleic Acid
ttttggtgggctagctacaacgaaacagctg

SEQ ID NO: 3956 - DNA, 31 bp, Artificial Sequence
  Description of Artificial Sequence:  Enzymatic Nucleic Acid
gagtcctgggctagctacaacgaaactttat

SEQ ID NO: 3957 - DNA, 31 bp, Artificial Sequence
  Description of Artificial Sequence:  Enzymatic Nucleic Acid
ctttttcaggctagctacaacgaagagtcct

SEQ ID NO: 3958 - DNA, 31 bp, Artificial Sequence
  Description of Artificial Sequence:  Enzymatic Nucleic Acid
aaacattaggctagctacaacgaagaagcct

SEQ ID NO: 3959 - DNA, 31 bp, Artificial Sequence
  Description of Artificial Sequence:  Enzymatic Nucleic Acid
ttcaactaggctagctacaacgaagaatcaa

SEQ ID NO: 3960 - DNA, 31 bp, Artificial Sequence
  Description of Artificial Sequence:  Enzymatic Nucleic Acid
ttgttctgggctagctacaacgaacagaatt

SEQ ID NO: 3961 - DNA, 31 bp, Artificial Sequence
  Description of Artificial Sequence:  Enzymatic Nucleic Acid
tgttgtcaggctagctacaacgaaggagtgg

SEQ ID NO: 3962 - DNA, 31 bp, Artificial Sequence
  Description of Artificial Sequence:  Enzymatic Nucleic Acid
tcactttgggctagctacaacgaacatgggc

SEQ ID NO: 3963 - DNA, 31 bp, Artificial Sequence
  Description of Artificial Sequence:  Enzymatic Nucleic Acid
tttatctgggctagctacaacgaatgagttc

SEQ ID NO: 3964 - DNA, 31 bp, Artificial Sequence
  Description of Artificial Sequence:  Enzymatic Nucleic Acid
gctgcaggggctagctacaacgaaatctttt

SEQ ID NO: 3965 - DNA, 31 bp, Artificial Sequence
  Description of Artificial Sequence:  Enzymatic Nucleic Acid
aatcacagggctagctacaacgaaaatgccg

SEQ ID NO: 3966 - DNA, 31 bp, Artificial Sequence
  Description of Artificial Sequence:  Enzymatic Nucleic Acid
cagttggaggctagctacaacgaatttcttc

SEQ ID NO: 3967 - DNA, 31 bp, Artificial Sequence
  Description of Artificial Sequence:  Enzymatic Nucleic Acid
cccacttaggctagctacaacgaagtgttgt

SEQ ID NO: 3968 - DNA, 31 bp, Artificial Sequence
  Description of Artificial Sequence:  Enzymatic Nucleic Acid
tatgtctgggctagctacaacgaaaacctcc

SEQ ID NO: 3969 - DNA, 31 bp, Artificial Sequence
  Description of Artificial Sequence:  Enzymatic Nucleic Acid
ctgaagcaggctagctacaacgaatgtctgt

SEQ ID NO: 3970 - DNA, 31 bp, Artificial Sequence
  Description of Artificial Sequence:  Enzymatic Nucleic Acid
ccaggtgaggctagctacaacgaaagaaaca

SEQ ID NO: 3971 - DNA, 31 bp, Artificial Sequence
  Description of Artificial Sequence:  Enzymatic Nucleic Acid
tttggaggggctagctacaacgaaggccatt

SEQ ID NO: 3972 - DNA, 31 bp, Artificial Sequence
  Description of Artificial Sequence:  Enzymatic Nucleic Acid
gcagactgggctagctacaacgaatttccaa

SEQ ID NO: 3973 - DNA, 31 bp, Artificial Sequence
  Description of Artificial Sequence:  Enzymatic Nucleic Acid
aggcagggggctagctacaacgaagcattgg

SEQ ID NO: 3974 - DNA, 31 bp, Artificial Sequence
  Description of Artificial Sequence:  Enzymatic Nucleic Acid
agtcactgggctagctacaacgaaattggag

SEQ ID NO: 3975 - DNA, 31 bp, Artificial Sequence
  Description of Artificial Sequence:  Enzymatic Nucleic Acid
tatttgcaggctagctacaacgaaaactacc

SEQ ID NO: 3976 - DNA, 31 bp, Artificial Sequence
  Description of Artificial Sequence:  Enzymatic Nucleic Acid
ttggcgaaggctagctacaacgaatttgcat

SEQ ID NO: 3977 - DNA, 31 bp, Artificial Sequence
  Description of Artificial Sequence:  Enzymatic Nucleic Acid
ttccaaggggctagctacaacgaaactgttt

SEQ ID NO: 3978 - DNA, 31 bp, Artificial Sequence
  Description of Artificial Sequence:  Enzymatic Nucleic Acid
ttatccagggctagctacaacgaagttccaa

SEQ ID NO: 3979 - DNA, 31 bp, Artificial Sequence
  Description of Artificial Sequence:  Enzymatic Nucleic Acid
atccttagggctagctacaacgaagcatcag

SEQ ID NO: 3980 - DNA, 31 bp, Artificial Sequence
  Description of Artificial Sequence:  Enzymatic Nucleic Acid
accttgagggctagctacaacgaagacaccg

SEQ ID NO: 3981 - DNA, 31 bp, Artificial Sequence
  Description of Artificial Sequence:  Enzymatic Nucleic Acid
ttgtgaaaggctagctacaacgaaccttgag

SEQ ID NO: 3982 - DNA, 31 bp, Artificial Sequence
  Description of Artificial Sequence:  Enzymatic Nucleic Acid
tcgtgtcaggctagctacaacgaaagttgtg

SEQ ID NO: 3983 - DNA, 31 bp, Artificial Sequence
  Description of Artificial Sequence:  Enzymatic Nucleic Acid
ttacactgggctagctacaacgaatctacca

SEQ ID NO: 3984 - DNA, 31 bp, Artificial Sequence
  Description of Artificial Sequence:  Enzymatic Nucleic Acid
tgctggggggctagctacaacgaatcactct

SEQ ID NO: 3985 - DNA, 31 bp, Artificial Sequence
  Description of Artificial Sequence:  Enzymatic Nucleic Acid
caggtatgggctagctacaacgaacagtgct

SEQ ID NO: 3986 - DNA, 31 bp, Artificial Sequence
  Description of Artificial Sequence:  Enzymatic Nucleic Acid
cagccaggggctagctacaacgaatgtacag

SEQ ID NO: 3987 - DNA, 31 bp, Artificial Sequence
  Description of Artificial Sequence:  Enzymatic Nucleic Acid
ttccattgggctagctacaacgaatttcatc

SEQ ID NO: 3988 - DNA, 31 bp, Artificial Sequence
  Description of Artificial Sequence:  Enzymatic Nucleic Acid
agatcaggggctagctacaacgaatgggagc

SEQ ID NO: 3989 - DNA, 31 bp, Artificial Sequence
  Description of Artificial Sequence:  Enzymatic Nucleic Acid
catggtcaggctagctacaacgaaatcatcc

SEQ ID NO: 3990 - DNA, 31 bp, Artificial Sequence
  Description of Artificial Sequence:  Enzymatic Nucleic Acid
gaatgataggctagctacaacgaacttgtga

SEQ ID NO: 3991 - DNA, 31 bp, Artificial Sequence
  Description of Artificial Sequence:  Enzymatic Nucleic Acid
tcgaatgaggctagctacaacgaatacttgt

SEQ ID NO: 3992 - DNA, 31 bp, Artificial Sequence
  Description of Artificial Sequence:  Enzymatic Nucleic Acid
aatacttgggctagctacaacgaacttattc

SEQ ID NO: 3993 - DNA, 31 bp, Artificial Sequence
  Description of Artificial Sequence:  Enzymatic Nucleic Acid
atcaagaaggctagctacaacgaacttgtac

SEQ ID NO: 3994 - DNA, 31 bp, Artificial Sequence
  Description of Artificial Sequence:  Enzymatic Nucleic Acid
agcagtagggctagctacaacgaattcactt

SEQ ID NO: 3995 - DNA, 31 bp, Artificial Sequence
  Description of Artificial Sequence:  Enzymatic Nucleic Acid
gagagcagggctagctacaacgaagtattca

SEQ ID NO: 3996 - DNA, 31 bp, Artificial Sequence
  Description of Artificial Sequence:  Enzymatic Nucleic Acid
ttcaaaagggctagctacaacgaaatgtttt

SEQ ID NO: 3997 - DNA, 31 bp, Artificial Sequence
  Description of Artificial Sequence:  Enzymatic Nucleic Acid
agcctgaaggctagctacaacgaagcaatga

SEQ ID NO: 3998 - DNA, 31 bp, Artificial Sequence
  Description of Artificial Sequence:  Enzymatic Nucleic Acid
atgttggaggctagctacaacgaatttctga

SEQ ID NO: 3999 - DNA, 31 bp, Artificial Sequence
  Description of Artificial Sequence:  Enzymatic Nucleic Acid
aacaaagaggctagctacaacgaactcgtgc

SEQ ID NO: 4000 - DNA, 31 bp, Artificial Sequence
  Description of Artificial Sequence:  Enzymatic Nucleic Acid
tggaggaaggctagctacaacgaaaacaaag

SEQ ID NO: 4001 - DNA, 31 bp, Artificial Sequence
  Description of Artificial Sequence:  Enzymatic Nucleic Acid
gatatgaaggctagctacaacgaattaggac

SEQ ID NO: 4002 - DNA, 31 bp, Artificial Sequence
  Description of Artificial Sequence:  Enzymatic Nucleic Acid
gctgttgaggctagctacaacgaatgaatat

SEQ ID NO: 4003 - DNA, 31 bp, Artificial Sequence
  Description of Artificial Sequence:  Enzymatic Nucleic Acid
cttccacaggctagctacaacgaaattttta

SEQ ID NO: 4004 - DNA, 31 bp, Artificial Sequence
  Description of Artificial Sequence:  Enzymatic Nucleic Acid
aaattttaggctagctacaacgaaatcaaaa

SEQ ID NO: 4005 - DNA, 31 bp, Artificial Sequence
  Description of Artificial Sequence:  Enzymatic Nucleic Acid
gtctaaaaggctagctacaacgaacatttta

SEQ ID NO: 4006 - DNA, 31 bp, Artificial Sequence
  Description of Artificial Sequence:  Enzymatic Nucleic Acid
atttagtaggctagctacaacgaatcgcccc

SEQ ID NO: 4007 - DNA, 31 bp, Artificial Sequence
  Description of Artificial Sequence:  Enzymatic Nucleic Acid
acatttagggctagctacaacgaatatcgcc

SEQ ID NO: 4008 - DNA, 31 bp, Artificial Sequence
  Description of Artificial Sequence:  Enzymatic Nucleic Acid
gtactataggctagctacaacgaacatttag

SEQ ID NO: 4009 - DNA, 31 bp, Artificial Sequence
  Description of Artificial Sequence:  Enzymatic Nucleic Acid
atgtactaggctagctacaacgaatacattt

SEQ ID NO: 4010 - DNA, 31 bp, Artificial Sequence
  Description of Artificial Sequence:  Enzymatic Nucleic Acid
tataaatgggctagctacaacgaactatata

SEQ ID NO: 4011 - DNA, 31 bp, Artificial Sequence
  Description of Artificial Sequence:  Enzymatic Nucleic Acid
atttagtaggctagctacaacgaaaatgtac

SEQ ID NO: 4012 - DNA, 31 bp, Artificial Sequence
  Description of Artificial Sequence:  Enzymatic Nucleic Acid
acatttagggctagctacaacgaataaatgt

SEQ ID NO: 4013 - DNA, 31 bp, Artificial Sequence
  Description of Artificial Sequence:  Enzymatic Nucleic Acid
tacaggaaggctagctacaacgaacatttag

SEQ ID NO: 4014 - DNA, 31 bp, Artificial Sequence
  Description of Artificial Sequence:  Enzymatic Nucleic Acid
gtctaaaaggctagctacaacgaacatttag

SEQ ID NO: 4015 - DNA, 31 bp, Artificial Sequence
  Description of Artificial Sequence:  Enzymatic Nucleic Acid
cctcttcaggctagctacaacgagctcccct

SEQ ID NO: 4016 - DNA, 31 bp, Artificial Sequence
  Description of Artificial Sequence:  Enzymatic Nucleic Acid
gtgccagaggctagctacaacgagcttgaca

SEQ ID NO: 4017 - DNA, 31 bp, Artificial Sequence
  Description of Artificial Sequence:  Enzymatic Nucleic Acid
ttcagctgggctagctacaacgagccagatg

SEQ ID NO: 4018 - DNA, 31 bp, Artificial Sequence
  Description of Artificial Sequence:  Enzymatic Nucleic Acid
taggagaaggctagctacaacgagataacaa

SEQ ID NO: 4019 - DNA, 31 bp, Artificial Sequence
  Description of Artificial Sequence:  Enzymatic Nucleic Acid
acctgatgggctagctacaacgagttttact

SEQ ID NO: 4020 - DNA, 31 bp, Artificial Sequence
  Description of Artificial Sequence:  Enzymatic Nucleic Acid
tgacctgaggctagctacaacgagtgtttta

SEQ ID NO: 4021 - DNA, 31 bp, Artificial Sequence
  Description of Artificial Sequence:  Enzymatic Nucleic Acid
atcggaagggctagctacaacgaggtttatc

SEQ ID NO: 4022 - DNA, 31 bp, Artificial Sequence
  Description of Artificial Sequence:  Enzymatic Nucleic Acid
tacagataggctagctacaacgagaaaatat

SEQ ID NO: 4023 - DNA, 31 bp, Artificial Sequence
  Description of Artificial Sequence:  Enzymatic Nucleic Acid
tacgaaggggctagctacaacgagtctttct

SEQ ID NO: 4024 - DNA, 31 bp, Artificial Sequence
  Description of Artificial Sequence:  Enzymatic Nucleic Acid
ttggaaaaggctagctacaacgagcgggtta

SEQ ID NO: 4025 - DNA, 31 bp, Artificial Sequence
  Description of Artificial Sequence:  Enzymatic Nucleic Acid
tctccctgggctagctacaacgagattcctc

SEQ ID NO: 4026 - DNA, 31 bp, Artificial Sequence
  Description of Artificial Sequence:  Enzymatic Nucleic Acid
ctcttaaaggctagctacaacgaggccccat

SEQ ID NO: 4027 - DNA, 31 bp, Artificial Sequence
  Description of Artificial Sequence:  Enzymatic Nucleic Acid
aatcaagaggctagctacaacgagaacacag

SEQ ID NO: 4028 - DNA, 31 bp, Artificial Sequence
  Description of Artificial Sequence:  Enzymatic Nucleic Acid
ctagaaggggctagctacaacgagaagaatc

SEQ ID NO: 4029 - DNA, 31 bp, Artificial Sequence
  Description of Artificial Sequence:  Enzymatic Nucleic Acid
tgaatgagggctagctacaacgagaattact

SEQ ID NO: 4030 - DNA, 31 bp, Artificial Sequence
  Description of Artificial Sequence:  Enzymatic Nucleic Acid
cagctgaaggctagctacaacgagagtgaat

SEQ ID NO: 4031 - DNA, 31 bp, Artificial Sequence
  Description of Artificial Sequence:  Enzymatic Nucleic Acid
aacgacaaggctagctacaacgagccttcat

SEQ ID NO: 4032 - DNA, 31 bp, Artificial Sequence
  Description of Artificial Sequence:  Enzymatic Nucleic Acid
tgaatgagggctagctacaacgagtttcatc

SEQ ID NO: 4033 - DNA, 31 bp, Artificial Sequence
  Description of Artificial Sequence:  Enzymatic Nucleic Acid
ttgttgaaggctagctacaacgagagtgttt

SEQ ID NO: 4034 - DNA, 31 bp, Artificial Sequence
  Description of Artificial Sequence:  Enzymatic Nucleic Acid
ggtcaccaggctagctacaacgagtccttta

SEQ ID NO: 4035 - DNA, 31 bp, Artificial Sequence
  Description of Artificial Sequence:  Enzymatic Nucleic Acid
tacagagaggctagctacaacgagcctgggt

SEQ ID NO: 4036 - DNA, 31 bp, Artificial Sequence
  Description of Artificial Sequence:  Enzymatic Nucleic Acid
aatcaaaaggctagctacaacgaggcaacat

SEQ ID NO: 4037 - DNA, 31 bp, Artificial Sequence
  Description of Artificial Sequence:  Enzymatic Nucleic Acid
gtcttccaggctagctacaacgagtttcagg

SEQ ID NO: 4038 - DNA, 31 bp, Artificial Sequence
  Description of Artificial Sequence:  Enzymatic Nucleic Acid
ctgctcagggctagctacaacgagtagggtt

SEQ ID NO: 4039 - DNA, 31 bp, Artificial Sequence
  Description of Artificial Sequence:  Enzymatic Nucleic Acid
gagtgaggggctagctacaacgaggatcctt

SEQ ID NO: 4040 - DNA, 31 bp, Artificial Sequence
  Description of Artificial Sequence:  Enzymatic Nucleic Acid
atcaggagggctagctacaacgagaggtgga

SEQ ID NO: 4041 - DNA, 31 bp, Artificial Sequence
  Description of Artificial Sequence:  Enzymatic Nucleic Acid
tcctgcaaggctagctacaacgagaaatcag

SEQ ID NO: 4042 - DNA, 31 bp, Artificial Sequence
  Description of Artificial Sequence:  Enzymatic Nucleic Acid
ttaccttgggctagctacaacgaggtccata

SEQ ID NO: 4043 - DNA, 31 bp, Artificial Sequence
  Description of Artificial Sequence:  Enzymatic Nucleic Acid
tggacaaaggctagctacaacgagccttacc

SEQ ID NO: 4044 - DNA, 31 bp, Artificial Sequence
  Description of Artificial Sequence:  Enzymatic Nucleic Acid
cccactcaggctagctacaacgaggacaaat

SEQ ID NO: 4045 - DNA, 31 bp, Artificial Sequence
  Description of Artificial Sequence:  Enzymatic Nucleic Acid
atcgtagaggctagctacaacgagagcccac

SEQ ID NO: 4046 - DNA, 31 bp, Artificial Sequence
  Description of Artificial Sequence:  Enzymatic Nucleic Acid
tcttttggggctagctacaacgagtaacagc

SEQ ID NO: 4047 - DNA, 31 bp, Artificial Sequence
  Description of Artificial Sequence:  Enzymatic Nucleic Acid
attgaatgggctagctacaacgagcatcttt

SEQ ID NO: 4048 - DNA, 31 bp, Artificial Sequence
  Description of Artificial Sequence:  Enzymatic Nucleic Acid
ttattgaaggctagctacaacgagtgcatct

SEQ ID NO: 4049 - DNA, 31 bp, Artificial Sequence
  Description of Artificial Sequence:  Enzymatic Nucleic Acid
acatgttgggctagctacaacgagcaaacat

SEQ ID NO: 4050 - DNA, 31 bp, Artificial Sequence
  Description of Artificial Sequence:  Enzymatic Nucleic Acid
aatcaacaggctagctacaacgagttgtgca

SEQ ID NO: 4051 - DNA, 31 bp, Artificial Sequence
  Description of Artificial Sequence:  Enzymatic Nucleic Acid
ctttgttgggctagctacaacgaggttttgt

SEQ ID NO: 4052 - DNA, 31 bp, Artificial Sequence
  Description of Artificial Sequence:  Enzymatic Nucleic Acid
ttcccatgggctagctacaacgagcttcgga

SEQ ID NO: 4053 - DNA, 31 bp, Artificial Sequence
  Description of Artificial Sequence:  Enzymatic Nucleic Acid
acttcccaggctagctacaacgagtgcttcg

SEQ ID NO: 4054 - DNA, 31 bp, Artificial Sequence
  Description of Artificial Sequence:  Enzymatic Nucleic Acid
cataggagggctagctacaacgaggttttct

SEQ ID NO: 4055 - DNA, 31 bp, Artificial Sequence
  Description of Artificial Sequence:  Enzymatic Nucleic Acid
ggtggctgggctagctacaacgagttgtcat

SEQ ID NO: 4056 - DNA, 31 bp, Artificial Sequence
  Description of Artificial Sequence:  Enzymatic Nucleic Acid
ggatttggggctagctacaacgaggctgtgt

SEQ ID NO: 4057 - DNA, 31 bp, Artificial Sequence
  Description of Artificial Sequence:  Enzymatic Nucleic Acid
tgagaaggggctagctacaacgagggatttg

SEQ ID NO: 4058 - DNA, 31 bp, Artificial Sequence
  Description of Artificial Sequence:  Enzymatic Nucleic Acid
tgcagcaaggctagctacaacgagagaaggt

SEQ ID NO: 4059 - DNA, 31 bp, Artificial Sequence
  Description of Artificial Sequence:  Enzymatic Nucleic Acid
agtcgccaggctagctacaacgagcttccag

SEQ ID NO: 4060 - DNA, 31 bp, Artificial Sequence
  Description of Artificial Sequence:  Enzymatic Nucleic Acid
ctgtcaaaggctagctacaacgagtcaccat

SEQ ID NO: 4061 - DNA, 31 bp, Artificial Sequence
  Description of Artificial Sequence:  Enzymatic Nucleic Acid
tttgtacaggctagctacaacgagggcagca

SEQ ID NO: 4062 - DNA, 31 bp, Artificial Sequence
  Description of Artificial Sequence:  Enzymatic Nucleic Acid
tatctgtaggctagctacaacgagagttcac

SEQ ID NO: 4063 - DNA, 31 bp, Artificial Sequence
  Description of Artificial Sequence:  Enzymatic Nucleic Acid
ggcgagtgggctagctacaacgagtccctgt

SEQ ID NO: 4064 - DNA, 31 bp, Artificial Sequence
  Description of Artificial Sequence:  Enzymatic Nucleic Acid
ttggcgagggctagctacaacgagtgtccct

SEQ ID NO: 4065 - DNA, 31 bp, Artificial Sequence
  Description of Artificial Sequence:  Enzymatic Nucleic Acid
gctgcagaggctagctacaacgaggacgtcc

SEQ ID NO: 4066 - DNA, 31 bp, Artificial Sequence
  Description of Artificial Sequence:  Enzymatic Nucleic Acid
acagtaaaggctagctacaacgagccgatcg

SEQ ID NO: 4067 - DNA, 31 bp, Artificial Sequence
  Description of Artificial Sequence:  Enzymatic Nucleic Acid
acttatagggctagctacaacgagttgtctt

SEQ ID NO: 4068 - DNA, 31 bp, Artificial Sequence
  Description of Artificial Sequence:  Enzymatic Nucleic Acid
gtggatgaggctagctacaacgaggcaccac

SEQ ID NO: 4069 - DNA, 31 bp, Artificial Sequence
  Description of Artificial Sequence:  Enzymatic Nucleic Acid
tgtgtggaggctagctacaacgagatggcac

SEQ ID NO: 4070 - DNA, 31 bp, Artificial Sequence
  Description of Artificial Sequence:  Enzymatic Nucleic Acid
cgactgtgggctagctacaacgaggatgatg

SEQ ID NO: 4071 - DNA, 31 bp, Artificial Sequence
  Description of Artificial Sequence:  Enzymatic Nucleic Acid
agcgactgggctagctacaacgagtggatga

SEQ ID NO: 4072 - DNA, 31 bp, Artificial Sequence
  Description of Artificial Sequence:  Enzymatic Nucleic Acid
gaagcataggctagctacaacgagtctgtaa

SEQ ID NO: 4073 - DNA, 31 bp, Artificial Sequence
  Description of Artificial Sequence:  Enzymatic Nucleic Acid
agcatcaaggctagctacaacgagaggccat

SEQ ID NO: 4074 - DNA, 31 bp, Artificial Sequence
  Description of Artificial Sequence:  Enzymatic Nucleic Acid
tttcctgaggctagctacaacgagaaagggc

SEQ ID NO: 4075 - DNA, 31 bp, Artificial Sequence
  Description of Artificial Sequence:  Enzymatic Nucleic Acid
aagctggaggctagctacaacgaggagcgct

SEQ ID NO: 4076 - DNA, 31 bp, Artificial Sequence
  Description of Artificial Sequence:  Enzymatic Nucleic Acid
gatcactgggctagctacaacgagccattca

SEQ ID NO: 4077 - DNA, 31 bp, Artificial Sequence
  Description of Artificial Sequence:  Enzymatic Nucleic Acid
tcccacggggctagctacaacgagctgtcca

SEQ ID NO: 4078 - DNA, 31 bp, Artificial Sequence
  Description of Artificial Sequence:  Enzymatic Nucleic Acid
aaacaaagggctagctacaacgagtcctttc

SEQ ID NO: 4079 - DNA, 31 bp, Artificial Sequence
  Description of Artificial Sequence:  Enzymatic Nucleic Acid
tgtccaggggctagctacaacgagataagaa

SEQ ID NO: 4080 - DNA, 31 bp, Artificial Sequence
  Description of Artificial Sequence:  Enzymatic Nucleic Acid
cattttggggctagctacaacgagtttttgt

SEQ ID NO: 4081 - DNA, 31 bp, Artificial Sequence
  Description of Artificial Sequence:  Enzymatic Nucleic Acid
cttagcaaggctagctacaacgagcctggga

SEQ ID NO: 4082 - DNA, 31 bp, Artificial Sequence
  Description of Artificial Sequence:  Enzymatic Nucleic Acid
tttccaagggctagctacaacgagccaacct

SEQ ID NO: 4083 - DNA, 31 bp, Artificial Sequence
  Description of Artificial Sequence:  Enzymatic Nucleic Acid
aaggtttgggctagctacaacgagagcttgc

SEQ ID NO: 4084 - DNA, 31 bp, Artificial Sequence
  Description of Artificial Sequence:  Enzymatic Nucleic Acid
acgggacgggctagctacaacgagacagtca

SEQ ID NO: 4085 - DNA, 31 bp, Artificial Sequence
  Description of Artificial Sequence:  Enzymatic Nucleic Acid
tttgctggggctagctacaacgagtccttgt

SEQ ID NO: 4086 - DNA, 31 bp, Artificial Sequence
  Description of Artificial Sequence:  Enzymatic Nucleic Acid
cagggctgggctagctacaacgagacactgg

SEQ ID NO: 4087 - DNA, 31 bp, Artificial Sequence
  Description of Artificial Sequence:  Enzymatic Nucleic Acid
ataagttgggctagctacaacgagaaatacc

SEQ ID NO: 4088 - DNA, 31 bp, Artificial Sequence
  Description of Artificial Sequence:  Enzymatic Nucleic Acid
accattcgggctagctacaacgagtcataag

SEQ ID NO: 4089 - DNA, 31 bp, Artificial Sequence
  Description of Artificial Sequence:  Enzymatic Nucleic Acid
atgtacagggctagctacaacgagctccact

SEQ ID NO: 4090 - DNA, 31 bp, Artificial Sequence
  Description of Artificial Sequence:  Enzymatic Nucleic Acid
gccaggtaggctagctacaacgagtacagtg

SEQ ID NO: 4091 - DNA, 31 bp, Artificial Sequence
  Description of Artificial Sequence:  Enzymatic Nucleic Acid
ggtcttggggctagctacaacgaggattcca

SEQ ID NO: 4092 - DNA, 31 bp, Artificial Sequence
  Description of Artificial Sequence:  Enzymatic Nucleic Acid
cttgcttgggctagctacaacgagttgaaca

SEQ ID NO: 4093 - DNA, 31 bp, Artificial Sequence
  Description of Artificial Sequence:  Enzymatic Nucleic Acid
cccgaggaggctagctacaacgagttctgct

SEQ ID NO: 4094 - DNA, 31 bp, Artificial Sequence
  Description of Artificial Sequence:  Enzymatic Nucleic Acid
gccacaaaggctagctacaacgagagcctcc

SEQ ID NO: 4095 - DNA, 31 bp, Artificial Sequence
  Description of Artificial Sequence:  Enzymatic Nucleic Acid
atcaggtaggctagctacaacgagggagcat

SEQ ID NO: 4096 - DNA, 31 bp, Artificial Sequence
  Description of Artificial Sequence:  Enzymatic Nucleic Acid
tggccaggggctagctacaacgagggaagag

SEQ ID NO: 4097 - DNA, 31 bp, Artificial Sequence
  Description of Artificial Sequence:  Enzymatic Nucleic Acid
caggtcggggctagctacaacgagatttggc

SEQ ID NO: 4098 - DNA, 31 bp, Artificial Sequence
  Description of Artificial Sequence:  Enzymatic Nucleic Acid
tgcccccgggctagctacaacgagaatttcc

SEQ ID NO: 4099 - DNA, 31 bp, Artificial Sequence
  Description of Artificial Sequence:  Enzymatic Nucleic Acid
cagattaaggctagctacaacgagagactgc

SEQ ID NO: 4100 - DNA, 31 bp, Artificial Sequence
  Description of Artificial Sequence:  Enzymatic Nucleic Acid
ctgttccaggctagctacaacgaggtcataa

SEQ ID NO: 4101 - DNA, 31 bp, Artificial Sequence
  Description of Artificial Sequence:  Enzymatic Nucleic Acid
tatacttgggctagctacaacgagagctgtt

SEQ ID NO: 4102 - DNA, 31 bp, Artificial Sequence
  Description of Artificial Sequence:  Enzymatic Nucleic Acid
tattcgaaggctagctacaacgagatatact

SEQ ID NO: 4103 - DNA, 31 bp, Artificial Sequence
  Description of Artificial Sequence:  Enzymatic Nucleic Acid
ctttgggaggctagctacaacgagagagcag

SEQ ID NO: 4104 - DNA, 31 bp, Artificial Sequence
  Description of Artificial Sequence:  Enzymatic Nucleic Acid
aaaagtaaggctagctacaacgagttttctg

SEQ ID NO: 4105 - DNA, 31 bp, Artificial Sequence
  Description of Artificial Sequence:  Enzymatic Nucleic Acid
aagatctgggctagctacaacgagccatttt

SEQ ID NO: 4106 - DNA, 31 bp, Artificial Sequence
  Description of Artificial Sequence:  Enzymatic Nucleic Acid
aatagcaaggctagctacaacgagaaaagat

SEQ ID NO: 4107 - DNA, 31 bp, Artificial Sequence
  Description of Artificial Sequence:  Enzymatic Nucleic Acid
tcgtgcaaggctagctacaacgagttggata

SEQ ID NO: 4108 - DNA, 31 bp, Artificial Sequence
  Description of Artificial Sequence:  Enzymatic Nucleic Acid
gatactcgggctagctacaacgagcaatgtt

SEQ ID NO: 4109 - DNA, 31 bp, Artificial Sequence
  Description of Artificial Sequence:  Enzymatic Nucleic Acid
ggagtctgggctagctacaacgaggaggaat

SEQ ID NO: 4110 - DNA, 31 bp, Artificial Sequence
  Description of Artificial Sequence:  Enzymatic Nucleic Acid
ggactaggggctagctacaacgagtctctgg

SEQ ID NO: 4111 - DNA, 31 bp, Artificial Sequence
  Description of Artificial Sequence:  Enzymatic Nucleic Acid
tgttgataggctagctacaacgagaatatta

SEQ ID NO: 4112 - DNA, 31 bp, Artificial Sequence
  Description of Artificial Sequence:  Enzymatic Nucleic Acid
aggaatggggctagctacaacgagctgttga

SEQ ID NO: 4113 - DNA, 31 bp, Artificial Sequence
  Description of Artificial Sequence:  Enzymatic Nucleic Acid
gccaggaaggctagctacaacgaggtgctgt

SEQ ID NO: 4114 - DNA, 31 bp, Artificial Sequence
  Description of Artificial Sequence:  Enzymatic Nucleic Acid
aatgtgaaggctagctacaacgagccaggaa

SEQ ID NO: 4115 - DNA, 31 bp, Artificial Sequence
  Description of Artificial Sequence:  Enzymatic Nucleic Acid
ttaaaatgggctagctacaacgagaatgcca

SEQ ID NO: 4116 - DNA, 31 bp, Artificial Sequence
  Description of Artificial Sequence:  Enzymatic Nucleic Acid
ttttaaaaggctagctacaacgagtgaatgc

SEQ ID NO: 4117 - DNA, 31 bp, Artificial Sequence
  Description of Artificial Sequence:  Enzymatic Nucleic Acid
aggatgaaggctagctacaacgagatttatt

SEQ ID NO: 4118 - DNA, 31 bp, Artificial Sequence
  Description of Artificial Sequence:  Enzymatic Nucleic Acid
aaaaaggaggctagctacaacgagaatgatt

SEQ ID NO: 4119 - DNA, 31 bp, Artificial Sequence
  Description of Artificial Sequence:  Enzymatic Nucleic Acid
agtataaaggctagctacaacgagtactata

SEQ ID NO: 4120 - DNA, 31 bp, Artificial Sequence
  Description of Artificial Sequence:  Enzymatic Nucleic Acid
tcaaattgggctagctacaacgagtacttgt

SEQ ID NO: 4121 - DNA, 31 bp, Artificial Sequence
  Description of Artificial Sequence:  Enzymatic Nucleic Acid
ggaaaatgggctagctacaacgagggttacg

SEQ ID NO: 4122 - DNA, 31 bp, Artificial Sequence
  Description of Artificial Sequence:  Enzymatic Nucleic Acid
gtcgattgggctagctacaacgaaacgacaa

SEQ ID NO: 4123 - DNA, 31 bp, Artificial Sequence
  Description of Artificial Sequence:  Enzymatic Nucleic Acid
tcttctggggctagctacaacgaacattggg

SEQ ID NO: 4124 - DNA, 31 bp, Artificial Sequence
  Description of Artificial Sequence:  Enzymatic Nucleic Acid
caaaatggggctagctacaacgaaacatttt

SEQ ID NO: 4125 - DNA, 31 bp, Artificial Sequence
  Description of Artificial Sequence:  Enzymatic Nucleic Acid
aacatcagggctagctacaacgaatttttgt

SEQ ID NO: 4126 - DNA, 31 bp, Artificial Sequence
  Description of Artificial Sequence:  Enzymatic Nucleic Acid
agactcagggctagctacaacgaaaccagaa

SEQ ID NO: 4127 - DNA, 31 bp, Artificial Sequence
  Description of Artificial Sequence:  Enzymatic Nucleic Acid
ttttcctgggctagctacaacgaaatgaaat

SEQ ID NO: 4128 - DNA, 31 bp, Artificial Sequence
  Description of Artificial Sequence:  Enzymatic Nucleic Acid
tgaatgtgggctagctacaacgaatcttttg

SEQ ID NO: 4129 - DNA, 31 bp, Artificial Sequence
  Description of Artificial Sequence:  Enzymatic Nucleic Acid
ccgtctggggctagctacaacgagggattgg

SEQ ID NO: 4130 - DNA, 31 bp, Artificial Sequence
  Description of Artificial Sequence:  Enzymatic Nucleic Acid
atgttgtgggctagctacaacgaaaacatta

SEQ ID NO: 4131 - DNA, 31 bp, Artificial Sequence
  Description of Artificial Sequence:  Enzymatic Nucleic Acid
ggagattgggctagctacaacgaatttttga

SEQ ID NO: 4132 - DNA, 31 bp, Artificial Sequence
  Description of Artificial Sequence:  Enzymatic Nucleic Acid
atctgcagggctagctacaacgaaatgagaa

SEQ ID NO: 4133 - DNA, 31 bp, Artificial Sequence
  Description of Artificial Sequence:  Enzymatic Nucleic Acid
ccaatctgggctagctacaacgaagcaatga

SEQ ID NO: 4134 - DNA, 31 bp, Artificial Sequence
  Description of Artificial Sequence:  Enzymatic Nucleic Acid
gattgaggggctagctacaacgaggttacca

SEQ ID NO: 4135 - DNA, 31 bp, Artificial Sequence
  Description of Artificial Sequence:  Enzymatic Nucleic Acid
gtctgcagggctagctacaacgaaggaaaag

SEQ ID NO: 4136 - DNA, 31 bp, Artificial Sequence
  Description of Artificial Sequence:  Enzymatic Nucleic Acid
actgtctgggctagctacaacgaagcaggaa

SEQ ID NO: 4137 - DNA, 31 bp, Artificial Sequence
  Description of Artificial Sequence:  Enzymatic Nucleic Acid
atgggcagggctagctacaacgaactgtcaa

SEQ ID NO: 4138 - DNA, 31 bp, Artificial Sequence
  Description of Artificial Sequence:  Enzymatic Nucleic Acid
tacatgggggctagctacaacgaagcactgt

SEQ ID NO: 4139 - DNA, 31 bp, Artificial Sequence
  Description of Artificial Sequence:  Enzymatic Nucleic Acid
tcttttggggctagctacaacgagagtgtgt

SEQ ID NO: 4140 - DNA, 31 bp, Artificial Sequence
  Description of Artificial Sequence:  Enzymatic Nucleic Acid
agctgctgggctagctacaacgaaggtaatc

SEQ ID NO: 4141 - DNA, 31 bp, Artificial Sequence
  Description of Artificial Sequence:  Enzymatic Nucleic Acid
gcccgctgggctagctacaacgaagatggac

SEQ ID NO: 4142 - DNA, 31 bp, Artificial Sequence
  Description of Artificial Sequence:  Enzymatic Nucleic Acid
gtcagcagggctagctacaacgaacaatttc

SEQ ID NO: 4143 - DNA, 31 bp, Artificial Sequence
  Description of Artificial Sequence:  Enzymatic Nucleic Acid
tccgtcagggctagctacaacgaagcacaat

SEQ ID NO: 4144 - DNA, 31 bp, Artificial Sequence
  Description of Artificial Sequence:  Enzymatic Nucleic Acid
cgttaaagggctagctacaacgaacccactt

SEQ ID NO: 4145 - DNA, 31 bp, Artificial Sequence
  Description of Artificial Sequence:  Enzymatic Nucleic Acid
gatgatggggctagctacaacgaaccacttt

SEQ ID NO: 4146 - DNA, 31 bp, Artificial Sequence
  Description of Artificial Sequence:  Enzymatic Nucleic Acid
ccccaaagggctagctacaacgagactgtgt

SEQ ID NO: 4147 - DNA, 31 bp, Artificial Sequence
  Description of Artificial Sequence:  Enzymatic Nucleic Acid
ttgagctgggctagctacaacgaagagggcc

SEQ ID NO: 4148 - DNA, 31 bp, Artificial Sequence
  Description of Artificial Sequence:  Enzymatic Nucleic Acid
atctgaagggctagctacaacgaatatgtct

SEQ ID NO: 4149 - DNA, 31 bp, Artificial Sequence
  Description of Artificial Sequence:  Enzymatic Nucleic Acid
cccaaaagggctagctacaacgaatcaatga

SEQ ID NO: 4150 - DNA, 31 bp, Artificial Sequence
  Description of Artificial Sequence:  Enzymatic Nucleic Acid
ggatggagggctagctacaacgagctgagag

SEQ ID NO: 4151 - DNA, 31 bp, Artificial Sequence
  Description of Artificial Sequence:  Enzymatic Nucleic Acid
ggaggctgggctagctacaacgagttgtcca

SEQ ID NO: 4152 - DNA, 31 bp, Artificial Sequence
  Description of Artificial Sequence:  Enzymatic Nucleic Acid
aaccttagggctagctacaacgaaatgcctg

SEQ ID NO: 4153 - DNA, 31 bp, Artificial Sequence
  Description of Artificial Sequence:  Enzymatic Nucleic Acid
cttgcttgggctagctacaacgaagactgta

SEQ ID NO: 4154 - DNA, 31 bp, Artificial Sequence
  Description of Artificial Sequence:  Enzymatic Nucleic Acid
attggacgggctagctacaacgaacgggacg

SEQ ID NO: 4155 - DNA, 31 bp, Artificial Sequence
  Description of Artificial Sequence:  Enzymatic Nucleic Acid
cagggtagggctagctacaacgaattggacg

SEQ ID NO: 4156 - DNA, 31 bp, Artificial Sequence
  Description of Artificial Sequence:  Enzymatic Nucleic Acid
attggaggggctagctacaacgaagggtagc

SEQ ID NO: 4157 - DNA, 31 bp, Artificial Sequence
  Description of Artificial Sequence:  Enzymatic Nucleic Acid
aatatttgggctagctacaacgaataaacta

SEQ ID NO: 4158 - DNA, 31 bp, Artificial Sequence
  Description of Artificial Sequence:  Enzymatic Nucleic Acid
ctccttggggctagctacaacgagaatattt

SEQ ID NO: 4159 - DNA, 31 bp, Artificial Sequence
  Description of Artificial Sequence:  Enzymatic Nucleic Acid
agcatcagggctagctacaacgaacctgctc

SEQ ID NO: 4160 - DNA, 31 bp, Artificial Sequence
  Description of Artificial Sequence:  Enzymatic Nucleic Acid
cttagtagggctagctacaacgaatcagcac

SEQ ID NO: 4161 - DNA, 31 bp, Artificial Sequence
  Description of Artificial Sequence:  Enzymatic Nucleic Acid
agagcccgggctagctacaacgaacttttac

SEQ ID NO: 4162 - DNA, 31 bp, Artificial Sequence
  Description of Artificial Sequence:  Enzymatic Nucleic Acid
tctggctgggctagctacaacgagttaactc

SEQ ID NO: 4163 - DNA, 31 bp, Artificial Sequence
  Description of Artificial Sequence:  Enzymatic Nucleic Acid
tatgggagggctagctacaacgaatttggga

SEQ ID NO: 4164 - DNA, 31 bp, Artificial Sequence
  Description of Artificial Sequence:  Enzymatic Nucleic Acid
gatgagagggctagctacaacgaagtagtat

SEQ ID NO: 4165 - DNA, 31 bp, Artificial Sequence
  Description of Artificial Sequence:  Enzymatic Nucleic Acid
ctgaatagggctagctacaacgaaatgaaaa

SEQ ID NO: 4166 - DNA, 31 bp, Artificial Sequence
  Description of Artificial Sequence:  Enzymatic Nucleic Acid
tactcgtgggctagctacaacgaaatgttgg

SEQ ID NO: 4167 - DNA, 31 bp, Artificial Sequence
  Description of Artificial Sequence:  Enzymatic Nucleic Acid
gtctctggggctagctacaacgaggagtctg

SEQ ID NO: 4168 - DNA, 31 bp, Artificial Sequence
  Description of Artificial Sequence:  Enzymatic Nucleic Acid
acaaggagggctagctacaacgaagacgttt

SEQ ID NO: 4169 - DNA, 31 bp, Artificial Sequence
  Description of Artificial Sequence:  Enzymatic Nucleic Acid
gacagctgggctagctacaacgaagttctcc

SEQ ID NO: 4170 - DNA, 31 bp, Artificial Sequence
  Description of Artificial Sequence:  Enzymatic Nucleic Acid
ttgtttagggctagctacaacgaattttatt

SEQ ID NO: 4171 - DNA, 31 bp, Artificial Sequence
  Description of Artificial Sequence:  Enzymatic Nucleic Acid
atattccaggctagctacaacgaatccattt

SEQ ID NO: 4172 - DNA, 31 bp, Artificial Sequence
  Description of Artificial Sequence:  Enzymatic Nucleic Acid
cccttaaaggctagctacaacgaaagaaaat

SEQ ID NO: 4173 - DNA, 31 bp, Artificial Sequence
  Description of Artificial Sequence:  Enzymatic Nucleic Acid
aacctcaaggctagctacaacgaacctcttc

SEQ ID NO: 4174 - DNA, 31 bp, Artificial Sequence
  Description of Artificial Sequence:  Enzymatic Nucleic Acid
atgcttgaggctagctacaacgaataacctc

SEQ ID NO: 4175 - DNA, 31 bp, Artificial Sequence
  Description of Artificial Sequence:  Enzymatic Nucleic Acid
aatgataaggctagctacaacgaaatatctt

SEQ ID NO: 4176 - DNA, 31 bp, Artificial Sequence
  Description of Artificial Sequence:  Enzymatic Nucleic Acid
gtttatcaggctagctacaacgaaggtcttt

SEQ ID NO: 4177 - DNA, 31 bp, Artificial Sequence
  Description of Artificial Sequence:  Enzymatic Nucleic Acid
tatagacaggctagctacaacgaacgtttcc

SEQ ID NO: 4178 - DNA, 31 bp, Artificial Sequence
  Description of Artificial Sequence:  Enzymatic Nucleic Acid
aatatagaggctagctacaacgaacacgttt

SEQ ID NO: 4179 - DNA, 31 bp, Artificial Sequence
  Description of Artificial Sequence:  Enzymatic Nucleic Acid
tatatataggctagctacaacgaagatatga

SEQ ID NO: 4180 - DNA, 31 bp, Artificial Sequence
  Description of Artificial Sequence:  Enzymatic Nucleic Acid
ttgctgtaggctagctacaacgaatctccct

SEQ ID NO: 4181 - DNA, 31 bp, Artificial Sequence
  Description of Artificial Sequence:  Enzymatic Nucleic Acid
gatgaacaggctagctacaacgaagaactct

SEQ ID NO: 4182 - DNA, 31 bp, Artificial Sequence
  Description of Artificial Sequence:  Enzymatic Nucleic Acid
aagatgaaggctagctacaacgaacagaact

SEQ ID NO: 4183 - DNA, 31 bp, Artificial Sequence
  Description of Artificial Sequence:  Enzymatic Nucleic Acid
tgcaacgaggctagctacaacgaaatgcctt

SEQ ID NO: 4184 - DNA, 31 bp, Artificial Sequence
  Description of Artificial Sequence:  Enzymatic Nucleic Acid
ttctggcaggctagctacaacgaattggggt

SEQ ID NO: 4185 - DNA, 31 bp, Artificial Sequence
  Description of Artificial Sequence:  Enzymatic Nucleic Acid
aacagataggctagctacaacgaagagatgc

SEQ ID NO: 4186 - DNA, 31 bp, Artificial Sequence
  Description of Artificial Sequence:  Enzymatic Nucleic Acid
gcttcaaaggctagctacaacgaagatacag

SEQ ID NO: 4187 - DNA, 31 bp, Artificial Sequence
  Description of Artificial Sequence:  Enzymatic Nucleic Acid
aatggcaaggctagctacaacgaatttttga

SEQ ID NO: 4188 - DNA, 31 bp, Artificial Sequence
  Description of Artificial Sequence:  Enzymatic Nucleic Acid
tggtctcaggctagctacaacgaatagtcag

SEQ ID NO: 4189 - DNA, 31 bp, Artificial Sequence
  Description of Artificial Sequence:  Enzymatic Nucleic Acid
aaccagaaggctagctacaacgaatcagcat

SEQ ID NO: 4190 - DNA, 31 bp, Artificial Sequence
  Description of Artificial Sequence:  Enzymatic Nucleic Acid
tctctccaggctagctacaacgaagttgccc

SEQ ID NO: 4191 - DNA, 31 bp, Artificial Sequence
  Description of Artificial Sequence:  Enzymatic Nucleic Acid
ctcatggaggctagctacaacgaaaatgcct

SEQ ID NO: 4192 - DNA, 31 bp, Artificial Sequence
  Description of Artificial Sequence:  Enzymatic Nucleic Acid
ctgctgaaggctagctacaacgaatcttact

SEQ ID NO: 4193 - DNA, 31 bp, Artificial Sequence
  Description of Artificial Sequence:  Enzymatic Nucleic Acid
ctttactaggctagctacaacgaatttgtac

SEQ ID NO: 4194 - DNA, 31 bp, Artificial Sequence
  Description of Artificial Sequence:  Enzymatic Nucleic Acid
ctccctgaggctagctacaacgaacttcttt

SEQ ID NO: 4195 - DNA, 31 bp, Artificial Sequence
  Description of Artificial Sequence:  Enzymatic Nucleic Acid
tggtgtaaggctagctacaacgaagctgcct

SEQ ID NO: 4196 - DNA, 31 bp, Artificial Sequence
  Description of Artificial Sequence:  Enzymatic Nucleic Acid
caaactcaggctagctacaacgaatcctttt

SEQ ID NO: 4197 - DNA, 31 bp, Artificial Sequence
  Description of Artificial Sequence:  Enzymatic Nucleic Acid
ttggagaaggctagctacaacgaaaactcac

SEQ ID NO: 4198 - DNA, 31 bp, Artificial Sequence
  Description of Artificial Sequence:  Enzymatic Nucleic Acid
tgtgcaaaggctagctacaacgaattataga

SEQ ID NO: 4199 - DNA, 31 bp, Artificial Sequence
  Description of Artificial Sequence:  Enzymatic Nucleic Acid
agaatcaaggctagctacaacgaatgttgtg

SEQ ID NO: 4200 - DNA, 31 bp, Artificial Sequence
  Description of Artificial Sequence:  Enzymatic Nucleic Acid
gttctgtaggctagctacaacgaagaattca

SEQ ID NO: 4201 - DNA, 31 bp, Artificial Sequence
  Description of Artificial Sequence:  Enzymatic Nucleic Acid
taaacacaggctagctacaacgaaattcttt

SEQ ID NO: 4202 - DNA, 31 bp, Artificial Sequence
  Description of Artificial Sequence:  Enzymatic Nucleic Acid
actaaacaggctagctacaacgaacaattct

SEQ ID NO: 4203 - DNA, 31 bp, Artificial Sequence
  Description of Artificial Sequence:  Enzymatic Nucleic Acid
ggactaaaggctagctacaacgaacacaatt

SEQ ID NO: 4204 - DNA, 31 bp, Artificial Sequence
  Description of Artificial Sequence:  Enzymatic Nucleic Acid
actttgtaggctagctacaacgaatgggcag

SEQ ID NO: 4205 - DNA, 31 bp, Artificial Sequence
  Description of Artificial Sequence:  Enzymatic Nucleic Acid
cctaatcaggctagctacaacgaagtaaatg

SEQ ID NO: 4206 - DNA, 31 bp, Artificial Sequence
  Description of Artificial Sequence:  Enzymatic Nucleic Acid
cagcagcaggctagctacaacgaaatttcag

SEQ ID NO: 4207 - DNA, 31 bp, Artificial Sequence
  Description of Artificial Sequence:  Enzymatic Nucleic Acid
attttggaggctagctacaacgaagctcctc

SEQ ID NO: 4208 - DNA, 31 bp, Artificial Sequence
  Description of Artificial Sequence:  Enzymatic Nucleic Acid
ctgagagaggctagctacaacgaagctccat

SEQ ID NO: 4209 - DNA, 31 bp, Artificial Sequence
  Description of Artificial Sequence:  Enzymatic Nucleic Acid
ataagaaaggctagctacaacgaaaagtgtc

SEQ ID NO: 4210 - DNA, 31 bp, Artificial Sequence
  Description of Artificial Sequence:  Enzymatic Nucleic Acid
gtccactaggctagctacaacgaaaagccac

SEQ ID NO: 4211 - DNA, 31 bp, Artificial Sequence
  Description of Artificial Sequence:  Enzymatic Nucleic Acid
ggacgtgaggctagctacaacgaagtcaggg

SEQ ID NO: 4212 - DNA, 31 bp, Artificial Sequence
  Description of Artificial Sequence:  Enzymatic Nucleic Acid
ggctgtgaggctagctacaacgaactggccc

SEQ ID NO: 4213 - DNA, 31 bp, Artificial Sequence
  Description of Artificial Sequence:  Enzymatic Nucleic Acid
tgagtagaggctagctacaacgaaccgtcat

SEQ ID NO: 4214 - DNA, 31 bp, Artificial Sequence
  Description of Artificial Sequence:  Enzymatic Nucleic Acid
cacttttaggctagctacaacgaactgtatc

SEQ ID NO: 4215 - DNA, 31 bp, Artificial Sequence
  Description of Artificial Sequence:  Enzymatic Nucleic Acid
ggtatgtaggctagctacaacgaagtgctcc

SEQ ID NO: 4216 - DNA, 31 bp, Artificial Sequence
  Description of Artificial Sequence:  Enzymatic Nucleic Acid
gtgttgaaggctagctacaacgaatcatcct

SEQ ID NO: 4217 - DNA, 31 bp, Artificial Sequence
  Description of Artificial Sequence:  Enzymatic Nucleic Acid
ctgaaacaggctagctacaacgaacttgctt

SEQ ID NO: 4218 - DNA, 31 bp, Artificial Sequence
  Description of Artificial Sequence:  Enzymatic Nucleic Acid
tgctgaaaggctagctacaacgaacacttgc

SEQ ID NO: 4219 - DNA, 31 bp, Artificial Sequence
  Description of Artificial Sequence:  Enzymatic Nucleic Acid
agaagccaggctagctacaacgaaaatgagc

SEQ ID NO: 4220 - DNA, 31 bp, Artificial Sequence
  Description of Artificial Sequence:  Enzymatic Nucleic Acid
atttgggaggctagctacaacgaatcagaag

SEQ ID NO: 4221 - DNA, 31 bp, Artificial Sequence
  Description of Artificial Sequence:  Enzymatic Nucleic Acid
ggtttaaaggctagctacaacgaaaaaagac

SEQ ID NO: 4222 - DNA, 31 bp, Artificial Sequence
  Description of Artificial Sequence:  Enzymatic Nucleic Acid
cttatcaaggctagctacaacgaagcctgaa

SEQ ID NO: 4223 - DNA, 31 bp, Artificial Sequence
  Description of Artificial Sequence:  Enzymatic Nucleic Acid
ggaataaaggctagctacaacgaaaagatac

SEQ ID NO: 4224 - DNA, 31 bp, Artificial Sequence
  Description of Artificial Sequence:  Enzymatic Nucleic Acid
tattaggaggctagctacaacgaaaggagca

SEQ ID NO: 4225 - DNA, 31 bp, Artificial Sequence
  Description of Artificial Sequence:  Enzymatic Nucleic Acid
cacttccaggctagctacaacgaataatttt

SEQ ID NO: 4226 - DNA, 31 bp, Artificial Sequence
  Description of Artificial Sequence:  Enzymatic Nucleic Acid
gctattgaggctagctacaacgaagctgcag

SEQ ID NO: 4227 - DNA, 31 bp, Artificial Sequence
  Description of Artificial Sequence:  Enzymatic Nucleic Acid
ttatctgaggctagctacaacgaaaaaattc

SEQ ID NO: 4228 - DNA, 31 bp, Artificial Sequence
  Description of Artificial Sequence:  Enzymatic Nucleic Acid
ctaaaataggctagctacaacgaattttaga

SEQ ID NO: 4229 - DNA, 31 bp, Artificial Sequence
  Description of Artificial Sequence:  Enzymatic Nucleic Acid
gccccctaggctagctacaacgaaggaagtc

SEQ ID NO: 4230 - DNA, 31 bp, Artificial Sequence
  Description of Artificial Sequence:  Enzymatic Nucleic Acid
actatataggctagctacaacgaatttagta

SEQ ID NO: 4231 - DNA, 31 bp, Artificial Sequence
  Description of Artificial Sequence:  Enzymatic Nucleic Acid
caggaataggctagctacaacgaatttagta

SEQ ID NO: 4232 - DNA, 31 bp, Artificial Sequence
  Description of Artificial Sequence:  Enzymatic Nucleic Acid
gccccctaggctagctacaacgaaggaatac

SEQ ID NO: 4233 - DNA, 31 bp, Artificial Sequence
  Description of Artificial Sequence:  Enzymatic Nucleic Acid
ctaaaataggctagctacaacgaatttagta

SEQ ID NO: 4234 - DNA, 31 bp, Artificial Sequence
  Description of Artificial Sequence:  Enzymatic Nucleic Acid
catttgtaggctagctacaacgacaaaagca

SEQ ID NO: 4235 - DNA, 31 bp, Artificial Sequence
  Description of Artificial Sequence:  Enzymatic Nucleic Acid
tcttcatgggctagctacaacgatcccctta

SEQ ID NO: 4236 - DNA, 31 bp, Artificial Sequence
  Description of Artificial Sequence:  Enzymatic Nucleic Acid
cctcaacaggctagctacaacgactcttcat

SEQ ID NO: 4237 - DNA, 31 bp, Artificial Sequence
  Description of Artificial Sequence:  Enzymatic Nucleic Acid
tgacataaggctagctacaacgactcaacac

SEQ ID NO: 4238 - DNA, 31 bp, Artificial Sequence
  Description of Artificial Sequence:  Enzymatic Nucleic Acid
gccagatgggctagctacaacgattgacata

SEQ ID NO: 4239 - DNA, 31 bp, Artificial Sequence
  Description of Artificial Sequence:  Enzymatic Nucleic Acid
cagctgtgggctagctacaacgacagatgct

SEQ ID NO: 4240 - DNA, 31 bp, Artificial Sequence
  Description of Artificial Sequence:  Enzymatic Nucleic Acid
gccttcagggctagctacaacgatgtgccag

SEQ ID NO: 4241 - DNA, 31 bp, Artificial Sequence
  Description of Artificial Sequence:  Enzymatic Nucleic Acid
tccatctgggctagctacaacgacttcagct

SEQ ID NO: 4242 - DNA, 31 bp, Artificial Sequence
  Description of Artificial Sequence:  Enzymatic Nucleic Acid
attgcgtaggctagctacaacgattgtaaat

SEQ ID NO: 4243 - DNA, 31 bp, Artificial Sequence
  Description of Artificial Sequence:  Enzymatic Nucleic Acid
tactattgggctagctacaacgatcttgtct

SEQ ID NO: 4244 - DNA, 31 bp, Artificial Sequence
  Description of Artificial Sequence:  Enzymatic Nucleic Acid
gtgttttaggctagctacaacgatattgctc

SEQ ID NO: 4245 - DNA, 31 bp, Artificial Sequence
  Description of Artificial Sequence:  Enzymatic Nucleic Acid
ccccctgaggctagctacaacgactgatgtg

SEQ ID NO: 4246 - DNA, 31 bp, Artificial Sequence
  Description of Artificial Sequence:  Enzymatic Nucleic Acid
gtctttaaggctagctacaacgacccctgac

SEQ ID NO: 4247 - DNA, 31 bp, Artificial Sequence
  Description of Artificial Sequence:  Enzymatic Nucleic Acid
gtttccaaggctagctacaacgattatcgga

SEQ ID NO: 4248 - DNA, 31 bp, Artificial Sequence
  Description of Artificial Sequence:  Enzymatic Nucleic Acid
tagacacaggctagctacaacgagtttccaa

SEQ ID NO: 4249 - DNA, 31 bp, Artificial Sequence
  Description of Artificial Sequence:  Enzymatic Nucleic Acid
tttctttaggctagctacaacgacattatat

SEQ ID NO: 4250 - DNA, 31 bp, Artificial Sequence
  Description of Artificial Sequence:  Enzymatic Nucleic Acid
gcgggttaggctagctacaacgagaaggtgt

SEQ ID NO: 4251 - DNA, 31 bp, Artificial Sequence
  Description of Artificial Sequence:  Enzymatic Nucleic Acid
ccccattgggctagctacaacgatgtacatc

SEQ ID NO: 4252 - DNA, 31 bp, Artificial Sequence
  Description of Artificial Sequence:  Enzymatic Nucleic Acid
ttaaatggggctagctacaacgacccattgc

SEQ ID NO: 4253 - DNA, 31 bp, Artificial Sequence
  Description of Artificial Sequence:  Enzymatic Nucleic Acid
acacagaaggctagctacaacgatcttaaat

SEQ ID NO: 4254 - DNA, 31 bp, Artificial Sequence
  Description of Artificial Sequence:  Enzymatic Nucleic Acid
actcagggggctagctacaacgacccttcta

SEQ ID NO: 4255 - DNA, 31 bp, Artificial Sequence
  Description of Artificial Sequence:  Enzymatic Nucleic Acid
gtgaattaggctagctacaacgatcagggcc

SEQ ID NO: 4256 - DNA, 31 bp, Artificial Sequence
  Description of Artificial Sequence:  Enzymatic Nucleic Acid
ttgttcagggctagctacaacgatgaatgag

SEQ ID NO: 4257 - DNA, 31 bp, Artificial Sequence
  Description of Artificial Sequence:  Enzymatic Nucleic Acid
cttcatagggctagctacaacgacattgttg

SEQ ID NO: 4258 - DNA, 31 bp, Artificial Sequence
  Description of Artificial Sequence:  Enzymatic Nucleic Acid
cgacaatgggctagctacaacgacttcatag

SEQ ID NO: 4259 - DNA, 31 bp, Artificial Sequence
  Description of Artificial Sequence:  Enzymatic Nucleic Acid
gattgcaaggctagctacaacgagacaatgc

SEQ ID NO: 4260 - DNA, 31 bp, Artificial Sequence
  Description of Artificial Sequence:  Enzymatic Nucleic Acid
ctgggtcaggctagctacaacgacatgtcct

SEQ ID NO: 4261 - DNA, 31 bp, Artificial Sequence
  Description of Artificial Sequence:  Enzymatic Nucleic Acid
cagagatgggctagctacaacgactgggtca

SEQ ID NO: 4262 - DNA, 31 bp, Artificial Sequence
  Description of Artificial Sequence:  Enzymatic Nucleic Acid
tcctgtagggctagctacaacgattcaaaca

SEQ ID NO: 4263 - DNA, 31 bp, Artificial Sequence
  Description of Artificial Sequence:  Enzymatic Nucleic Acid
taaaatcgggctagctacaacgatttcctgt

SEQ ID NO: 4264 - DNA, 31 bp, Artificial Sequence
  Description of Artificial Sequence:  Enzymatic Nucleic Acid
atagtcagggctagctacaacgactttgtct

SEQ ID NO: 4265 - DNA, 31 bp, Artificial Sequence
  Description of Artificial Sequence:  Enzymatic Nucleic Acid
ctcagcaaggctagctacaacgacagaacat

SEQ ID NO: 4266 - DNA, 31 bp, Artificial Sequence
  Description of Artificial Sequence:  Enzymatic Nucleic Acid
ggagtagaggctagctacaacgatcagcaac

SEQ ID NO: 4267 - DNA, 31 bp, Artificial Sequence
  Description of Artificial Sequence:  Enzymatic Nucleic Acid
catcattaggctagctacaacgactggagga

SEQ ID NO: 4268 - DNA, 31 bp, Artificial Sequence
  Description of Artificial Sequence:  Enzymatic Nucleic Acid
cccatctgggctagctacaacgatcagtgta

SEQ ID NO: 4269 - DNA, 31 bp, Artificial Sequence
  Description of Artificial Sequence:  Enzymatic Nucleic Acid
cacagttgggctagctacaacgaccatctgc

SEQ ID NO: 4270 - DNA, 31 bp, Artificial Sequence
  Description of Artificial Sequence:  Enzymatic Nucleic Acid
tcctttcaggctagctacaacgaccttctct

SEQ ID NO: 4271 - DNA, 31 bp, Artificial Sequence
  Description of Artificial Sequence:  Enzymatic Nucleic Acid
tcagctaaggctagctacaacgattttttcc

SEQ ID NO: 4272 - DNA, 31 bp, Artificial Sequence
  Description of Artificial Sequence:  Enzymatic Nucleic Acid
atattcagggctagctacaacgataactttt

SEQ ID NO: 4273 - DNA, 31 bp, Artificial Sequence
  Description of Artificial Sequence:  Enzymatic Nucleic Acid
atgccttaggctagctacaacgacttgtggt

SEQ ID NO: 4274 - DNA, 31 bp, Artificial Sequence
  Description of Artificial Sequence:  Enzymatic Nucleic Acid
gacaaatgggctagctacaacgacttacctt

SEQ ID NO: 4275 - DNA, 31 bp, Artificial Sequence
  Description of Artificial Sequence:  Enzymatic Nucleic Acid
tgagcccaggctagctacaacgatcatggac

SEQ ID NO: 4276 - DNA, 31 bp, Artificial Sequence
  Description of Artificial Sequence:  Enzymatic Nucleic Acid
tagatgagggctagctacaacgaccactcat

SEQ ID NO: 4277 - DNA, 31 bp, Artificial Sequence
  Description of Artificial Sequence:  Enzymatic Nucleic Acid
gtcaaataggctagctacaacgatccccatc

SEQ ID NO: 4278 - DNA, 31 bp, Artificial Sequence
  Description of Artificial Sequence:  Enzymatic Nucleic Acid
ttattgtaggctagctacaacgatcgtcaaa

SEQ ID NO: 4279 - DNA, 31 bp, Artificial Sequence
  Description of Artificial Sequence:  Enzymatic Nucleic Acid
tcttactgggctagctacaacgattgtattc

SEQ ID NO: 4280 - DNA, 31 bp, Artificial Sequence
  Description of Artificial Sequence:  Enzymatic Nucleic Acid
acatcttaggctagctacaacgatgcttgta

SEQ ID NO: 4281 - DNA, 31 bp, Artificial Sequence
  Description of Artificial Sequence:  Enzymatic Nucleic Acid
aatacctgggctagctacaacgatgaacatc

SEQ ID NO: 4282 - DNA, 31 bp, Artificial Sequence
  Description of Artificial Sequence:  Enzymatic Nucleic Acid
cagtaataggctagctacaacgactgctgaa

SEQ ID NO: 4283 - DNA, 31 bp, Artificial Sequence
  Description of Artificial Sequence:  Enzymatic Nucleic Acid
catttgtaggctagctacaacgacagtaata

SEQ ID NO: 4284 - DNA, 31 bp, Artificial Sequence
  Description of Artificial Sequence:  Enzymatic Nucleic Acid
cttctttaggctagctacaacgatacatttg

SEQ ID NO: 4285 - DNA, 31 bp, Artificial Sequence
  Description of Artificial Sequence:  Enzymatic Nucleic Acid
ccctgacaggctagctacaacgattctttac

SEQ ID NO: 4286 - DNA, 31 bp, Artificial Sequence
  Description of Artificial Sequence:  Enzymatic Nucleic Acid
aacagctgggctagctacaacgactccctga

SEQ ID NO: 4287 - DNA, 31 bp, Artificial Sequence
  Description of Artificial Sequence:  Enzymatic Nucleic Acid
tgtaacagggctagctacaacgatgcctccc

SEQ ID NO: 4288 - DNA, 31 bp, Artificial Sequence
  Description of Artificial Sequence:  Enzymatic Nucleic Acid
tcctgtaaggctagctacaacgatttattga

SEQ ID NO: 4289 - DNA, 31 bp, Artificial Sequence
  Description of Artificial Sequence:  Enzymatic Nucleic Acid
agaacaaaggctagctacaacgatcacatcc

SEQ ID NO: 4290 - DNA, 31 bp, Artificial Sequence
  Description of Artificial Sequence:  Enzymatic Nucleic Acid
tatagaagggctagctacaacgacttctccg

SEQ ID NO: 4291 - DNA, 31 bp, Artificial Sequence
  Description of Artificial Sequence:  Enzymatic Nucleic Acid
gaattcaaggctagctacaacgatatagaat

SEQ ID NO: 4292 - DNA, 31 bp, Artificial Sequence
  Description of Artificial Sequence:  Enzymatic Nucleic Acid
gtttggagggctagctacaacgattctttgt

SEQ ID NO: 4293 - DNA, 31 bp, Artificial Sequence
  Description of Artificial Sequence:  Enzymatic Nucleic Acid
tgattttgggctagctacaacgattgtttgg

SEQ ID NO: 4294 - DNA, 31 bp, Artificial Sequence
  Description of Artificial Sequence:  Enzymatic Nucleic Acid
cccatgtgggctagctacaacgattcggaga

SEQ ID NO: 4295 - DNA, 31 bp, Artificial Sequence
  Description of Artificial Sequence:  Enzymatic Nucleic Acid
acggatcaggctagctacaacgattcccatg

SEQ ID NO: 4296 - DNA, 31 bp, Artificial Sequence
  Description of Artificial Sequence:  Enzymatic Nucleic Acid
cagaatcaggctagctacaacgaggatcact

SEQ ID NO: 4297 - DNA, 31 bp, Artificial Sequence
  Description of Artificial Sequence:  Enzymatic Nucleic Acid
tttggtggggctagctacaacgatgtgttgt

SEQ ID NO: 4298 - DNA, 31 bp, Artificial Sequence
  Description of Artificial Sequence:  Enzymatic Nucleic Acid
gtcaaggaggctagctacaacgataaacaca

SEQ ID NO: 4299 - DNA, 31 bp, Artificial Sequence
  Description of Artificial Sequence:  Enzymatic Nucleic Acid
tcgccatgggctagctacaacgattccagat

SEQ ID NO: 4300 - DNA, 31 bp, Artificial Sequence
  Description of Artificial Sequence:  Enzymatic Nucleic Acid
accagtcgggctagctacaacgacatgcttc

SEQ ID NO: 4301 - DNA, 31 bp, Artificial Sequence
  Description of Artificial Sequence:  Enzymatic Nucleic Acid
ggcggttaggctagctacaacgacagtcgcc

SEQ ID NO: 4302 - DNA, 31 bp, Artificial Sequence
  Description of Artificial Sequence:  Enzymatic Nucleic Acid
ctggcctgggctagctacaacgattgattca

SEQ ID NO: 4303 - DNA, 31 bp, Artificial Sequence
  Description of Artificial Sequence:  Enzymatic Nucleic Acid
aaagctggggctagctacaacgactgcttga

SEQ ID NO: 4304 - DNA, 31 bp, Artificial Sequence
  Description of Artificial Sequence:  Enzymatic Nucleic Acid
aggaaaagggctagctacaacgatggcctgc

SEQ ID NO: 4305 - DNA, 31 bp, Artificial Sequence
  Description of Artificial Sequence:  Enzymatic Nucleic Acid
cagctcaaggctagctacaacgatgtctgca

SEQ ID NO: 4306 - DNA, 31 bp, Artificial Sequence
  Description of Artificial Sequence:  Enzymatic Nucleic Acid
gaccccagggctagctacaacgatcaactgt

SEQ ID NO: 4307 - DNA, 31 bp, Artificial Sequence
  Description of Artificial Sequence:  Enzymatic Nucleic Acid
acccaggaggctagctacaacgacccagctc

SEQ ID NO: 4308 - DNA, 31 bp, Artificial Sequence
  Description of Artificial Sequence:  Enzymatic Nucleic Acid
catcccaaggctagctacaacgaccaggacc

SEQ ID NO: 4309 - DNA, 31 bp, Artificial Sequence
  Description of Artificial Sequence:  Enzymatic Nucleic Acid
aaatgtcaggctagctacaacgacatcccaa

SEQ ID NO: 4310 - DNA, 31 bp, Artificial Sequence
  Description of Artificial Sequence:  Enzymatic Nucleic Acid
gggcagcaggctagctacaacgatgtcaaat

SEQ ID NO: 4311 - DNA, 31 bp, Artificial Sequence
  Description of Artificial Sequence:  Enzymatic Nucleic Acid
tgagttcaggctagctacaacgatttgtaca

SEQ ID NO: 4312 - DNA, 31 bp, Artificial Sequence
  Description of Artificial Sequence:  Enzymatic Nucleic Acid
cactgccaggctagctacaacgatgtttatc

SEQ ID NO: 4313 - DNA, 31 bp, Artificial Sequence
  Description of Artificial Sequence:  Enzymatic Nucleic Acid
tgtcactgggctagctacaacgacactgttt

SEQ ID NO: 4314 - DNA, 31 bp, Artificial Sequence
  Description of Artificial Sequence:  Enzymatic Nucleic Acid
ccctgtcaggctagctacaacgatgccactg

SEQ ID NO: 4315 - DNA, 31 bp, Artificial Sequence
  Description of Artificial Sequence:  Enzymatic Nucleic Acid
tgaagctgggctagctacaacgatgcaggta

SEQ ID NO: 4316 - DNA, 31 bp, Artificial Sequence
  Description of Artificial Sequence:  Enzymatic Nucleic Acid
tcctgaagggctagctacaacgatgctgcag

SEQ ID NO: 4317 - DNA, 31 bp, Artificial Sequence
  Description of Artificial Sequence:  Enzymatic Nucleic Acid
cagatggaggctagctacaacgagtccctcc

SEQ ID NO: 4318 - DNA, 31 bp, Artificial Sequence
  Description of Artificial Sequence:  Enzymatic Nucleic Acid
gaagcccgggctagctacaacgatgcagatg

SEQ ID NO: 4319 - DNA, 31 bp, Artificial Sequence
  Description of Artificial Sequence:  Enzymatic Nucleic Acid
gatcgaagggctagctacaacgaccgctgca

SEQ ID NO: 4320 - DNA, 31 bp, Artificial Sequence
  Description of Artificial Sequence:  Enzymatic Nucleic Acid
agtaaatgggctagctacaacgacgatcgaa

SEQ ID NO: 4321 - DNA, 31 bp, Artificial Sequence
  Description of Artificial Sequence:  Enzymatic Nucleic Acid
agcacccaggctagctacaacgattatagtg

SEQ ID NO: 4322 - DNA, 31 bp, Artificial Sequence
  Description of Artificial Sequence:  Enzymatic Nucleic Acid
ttaaagcaggctagctacaacgaccacttat

SEQ ID NO: 4323 - DNA, 31 bp, Artificial Sequence
  Description of Artificial Sequence:  Enzymatic Nucleic Acid
ttgtttgaggctagctacaacgactcgttaa

SEQ ID NO: 4324 - DNA, 31 bp, Artificial Sequence
  Description of Artificial Sequence:  Enzymatic Nucleic Acid
tggcaccaggctagctacaacgatttgtttg

SEQ ID NO: 4325 - DNA, 31 bp, Artificial Sequence
  Description of Artificial Sequence:  Enzymatic Nucleic Acid
tgatggcaggctagctacaacgacactttgt

SEQ ID NO: 4326 - DNA, 31 bp, Artificial Sequence
  Description of Artificial Sequence:  Enzymatic Nucleic Acid
caaagcgaggctagctacaacgatgtgtgga

SEQ ID NO: 4327 - DNA, 31 bp, Artificial Sequence
  Description of Artificial Sequence:  Enzymatic Nucleic Acid
gcagagggggctagctacaacgacccaaagc

SEQ ID NO: 4328 - DNA, 31 bp, Artificial Sequence
  Description of Artificial Sequence:  Enzymatic Nucleic Acid
ttcttgagggctagctacaacgatgcagagg

SEQ ID NO: 4329 - DNA, 31 bp, Artificial Sequence
  Description of Artificial Sequence:  Enzymatic Nucleic Acid
ttggacagggctagctacaacgatcctctag

SEQ ID NO: 4330 - DNA, 31 bp, Artificial Sequence
  Description of Artificial Sequence:  Enzymatic Nucleic Acid
tctgtaaaggctagctacaacgactcctgtc

SEQ ID NO: 4331 - DNA, 31 bp, Artificial Sequence
  Description of Artificial Sequence:  Enzymatic Nucleic Acid
gttctgaaggctagctacaacgattgatctg

SEQ ID NO: 4332 - DNA, 31 bp, Artificial Sequence
  Description of Artificial Sequence:  Enzymatic Nucleic Acid
caatgaggggctagctacaacgacattgttc

SEQ ID NO: 4333 - DNA, 31 bp, Artificial Sequence
  Description of Artificial Sequence:  Enzymatic Nucleic Acid
tgaaagggggctagctacaacgacccaaaag

SEQ ID NO: 4334 - DNA, 31 bp, Artificial Sequence
  Description of Artificial Sequence:  Enzymatic Nucleic Acid
agagacagggctagctacaacgatccatttc

SEQ ID NO: 4335 - DNA, 31 bp, Artificial Sequence
  Description of Artificial Sequence:  Enzymatic Nucleic Acid
atggagcgggctagctacaacgatgagagac

SEQ ID NO: 4336 - DNA, 31 bp, Artificial Sequence
  Description of Artificial Sequence:  Enzymatic Nucleic Acid
ctctcaagggctagctacaacgatggatgga

SEQ ID NO: 4337 - DNA, 31 bp, Artificial Sequence
  Description of Artificial Sequence:  Enzymatic Nucleic Acid
atcccttaggctagctacaacgatctcaagc

SEQ ID NO: 4338 - DNA, 31 bp, Artificial Sequence
  Description of Artificial Sequence:  Enzymatic Nucleic Acid
tccactggggctagctacaacgatgttctgg

SEQ ID NO: 4339 - DNA, 31 bp, Artificial Sequence
  Description of Artificial Sequence:  Enzymatic Nucleic Acid
ttcatccaggctagctacaacgatggctgtt

SEQ ID NO: 4340 - DNA, 31 bp, Artificial Sequence
  Description of Artificial Sequence:  Enzymatic Nucleic Acid
tcactgtgggctagctacaacgacattcatc

SEQ ID NO: 4341 - DNA, 31 bp, Artificial Sequence
  Description of Artificial Sequence:  Enzymatic Nucleic Acid
cacgatcaggctagctacaacgatgtgccat

SEQ ID NO: 4342 - DNA, 31 bp, Artificial Sequence
  Description of Artificial Sequence:  Enzymatic Nucleic Acid
gctgtccaggctagctacaacgagatcactg

SEQ ID NO: 4343 - DNA, 31 bp, Artificial Sequence
  Description of Artificial Sequence:  Enzymatic Nucleic Acid
ccacggtgggctagctacaacgatgtccacg

SEQ ID NO: 4344 - DNA, 31 bp, Artificial Sequence
  Description of Artificial Sequence:  Enzymatic Nucleic Acid
ctttcccaggctagctacaacgaggtgctgt

SEQ ID NO: 4345 - DNA, 31 bp, Artificial Sequence
  Description of Artificial Sequence:  Enzymatic Nucleic Acid
tggggaggggctagctacaacgatgcgttgt

SEQ ID NO: 4346 - DNA, 31 bp, Artificial Sequence
  Description of Artificial Sequence:  Enzymatic Nucleic Acid
tctgtccaggctagctacaacgatgggatcc

SEQ ID NO: 4347 - DNA, 31 bp, Artificial Sequence
  Description of Artificial Sequence:  Enzymatic Nucleic Acid
ccaccttgggctagctacaacgattctgtcc

SEQ ID NO: 4348 - DNA, 31 bp, Artificial Sequence
  Description of Artificial Sequence:  Enzymatic Nucleic Acid
caaagccaggctagctacaacgacttgcttc

SEQ ID NO: 4349 - DNA, 31 bp, Artificial Sequence
  Description of Artificial Sequence:  Enzymatic Nucleic Acid
ctacaaagggctagctacaacgacaccttgc

SEQ ID NO: 4350 - DNA, 31 bp, Artificial Sequence
  Description of Artificial Sequence:  Enzymatic Nucleic Acid
tttgtccaggctagctacaacgatacaaagc

SEQ ID NO: 4351 - DNA, 31 bp, Artificial Sequence
  Description of Artificial Sequence:  Enzymatic Nucleic Acid
gaggtaggggctagctacaacgacattttgg

SEQ ID NO: 4352 - DNA, 31 bp, Artificial Sequence
  Description of Artificial Sequence:  Enzymatic Nucleic Acid
tagcaatgggctagctacaacgactgggatt

SEQ ID NO: 4353 - DNA, 31 bp, Artificial Sequence
  Description of Artificial Sequence:  Enzymatic Nucleic Acid
agtgccaaggctagctacaacgacttagcaa

SEQ ID NO: 4354 - DNA, 31 bp, Artificial Sequence
  Description of Artificial Sequence:  Enzymatic Nucleic Acid
tccaagtgggctagctacaacgacaacctta

SEQ ID NO: 4355 - DNA, 31 bp, Artificial Sequence
  Description of Artificial Sequence:  Enzymatic Nucleic Acid
cttgcagaggctagctacaacgatgtatttc

SEQ ID NO: 4356 - DNA, 31 bp, Artificial Sequence
  Description of Artificial Sequence:  Enzymatic Nucleic Acid
tgagcttgggctagctacaacgattgcagac

SEQ ID NO: 4357 - DNA, 31 bp, Artificial Sequence
  Description of Artificial Sequence:  Enzymatic Nucleic Acid
tttgtgagggctagctacaacgattgcttgc

SEQ ID NO: 4358 - DNA, 31 bp, Artificial Sequence
  Description of Artificial Sequence:  Enzymatic Nucleic Acid
gcacgggaggctagctacaacgagtgacagt

SEQ ID NO: 4359 - DNA, 31 bp, Artificial Sequence
  Description of Artificial Sequence:  Enzymatic Nucleic Acid
tggacgcaggctagctacaacgagggacgtg

SEQ ID NO: 4360 - DNA, 31 bp, Artificial Sequence
  Description of Artificial Sequence:  Enzymatic Nucleic Acid
gcattggaggctagctacaacgagcacggga

SEQ ID NO: 4361 - DNA, 31 bp, Artificial Sequence
  Description of Artificial Sequence:  Enzymatic Nucleic Acid
ggaagtcaggctagctacaacgatgtaattg

SEQ ID NO: 4362 - DNA, 31 bp, Artificial Sequence
  Description of Artificial Sequence:  Enzymatic Nucleic Acid
ggaatttgggctagctacaacgatggtgtcc

SEQ ID NO: 4363 - DNA, 31 bp, Artificial Sequence
  Description of Artificial Sequence:  Enzymatic Nucleic Acid
ccagagggggctagctacaacgatggggaat

SEQ ID NO: 4364 - DNA, 31 bp, Artificial Sequence
  Description of Artificial Sequence:  Enzymatic Nucleic Acid
ataaactaggctagctacaacgacagagggc

SEQ ID NO: 4365 - DNA, 31 bp, Artificial Sequence
  Description of Artificial Sequence:  Enzymatic Nucleic Acid
tgcataaaggctagctacaacgataccagag

SEQ ID NO: 4366 - DNA, 31 bp, Artificial Sequence
  Description of Artificial Sequence:  Enzymatic Nucleic Acid
tggggaggggctagctacaacgatccttggc

SEQ ID NO: 4367 - DNA, 31 bp, Artificial Sequence
  Description of Artificial Sequence:  Enzymatic Nucleic Acid
gacactggggctagctacaacgacctgagaa

SEQ ID NO: 4368 - DNA, 31 bp, Artificial Sequence
  Description of Artificial Sequence:  Enzymatic Nucleic Acid
ctgtgacaggctagctacaacgatggccctg

SEQ ID NO: 4369 - DNA, 31 bp, Artificial Sequence
  Description of Artificial Sequence:  Enzymatic Nucleic Acid
aatcagggggctagctacaacgatgtgacac

SEQ ID NO: 4370 - DNA, 31 bp, Artificial Sequence
  Description of Artificial Sequence:  Enzymatic Nucleic Acid
tccattcaggctagctacaacgatgattcaa

SEQ ID NO: 4371 - DNA, 31 bp, Artificial Sequence
  Description of Artificial Sequence:  Enzymatic Nucleic Acid
caaggtaaggctagctacaacgatgtttttc

SEQ ID NO: 4372 - DNA, 31 bp, Artificial Sequence
  Description of Artificial Sequence:  Enzymatic Nucleic Acid
agcacctgggctagctacaacgatccattat

SEQ ID NO: 4373 - DNA, 31 bp, Artificial Sequence
  Description of Artificial Sequence:  Enzymatic Nucleic Acid
catcagcaggctagctacaacgactgctcca

SEQ ID NO: 4374 - DNA, 31 bp, Artificial Sequence
  Description of Artificial Sequence:  Enzymatic Nucleic Acid
agtagacaggctagctacaacgacgtcatcc

SEQ ID NO: 4375 - DNA, 31 bp, Artificial Sequence
  Description of Artificial Sequence:  Enzymatic Nucleic Acid
gtgaaataggctagctacaacgacttgagta

SEQ ID NO: 4376 - DNA, 31 bp, Artificial Sequence
  Description of Artificial Sequence:  Enzymatic Nucleic Acid
tgtatctaggctagctacaacgacattcgtg

SEQ ID NO: 4377 - DNA, 31 bp, Artificial Sequence
  Description of Artificial Sequence:  Enzymatic Nucleic Acid
cttttacaggctagctacaacgatgtatcta

SEQ ID NO: 4378 - DNA, 31 bp, Artificial Sequence
  Description of Artificial Sequence:  Enzymatic Nucleic Acid
agcccgcaggctagctacaacgattttacac

SEQ ID NO: 4379 - DNA, 31 bp, Artificial Sequence
  Description of Artificial Sequence:  Enzymatic Nucleic Acid
tcccagagggctagctacaacgaccgcactt

SEQ ID NO: 4380 - DNA, 31 bp, Artificial Sequence
  Description of Artificial Sequence:  Enzymatic Nucleic Acid
tgcgttaaggctagctacaacgatcctccca

SEQ ID NO: 4381 - DNA, 31 bp, Artificial Sequence
  Description of Artificial Sequence:  Enzymatic Nucleic Acid
ccgtctggggctagctacaacgatgcgttaa

SEQ ID NO: 4382 - DNA, 31 bp, Artificial Sequence
  Description of Artificial Sequence:  Enzymatic Nucleic Acid
gggtatcaggctagctacaacgatctccgtc

SEQ ID NO: 4383 - DNA, 31 bp, Artificial Sequence
  Description of Artificial Sequence:  Enzymatic Nucleic Acid
ccactctgggctagctacaacgatggggtat

SEQ ID NO: 4384 - DNA, 31 bp, Artificial Sequence
  Description of Artificial Sequence:  Enzymatic Nucleic Acid
gtgctccaggctagctacaacgatctgctgg

SEQ ID NO: 4385 - DNA, 31 bp, Artificial Sequence
  Description of Artificial Sequence:  Enzymatic Nucleic Acid
gtacagtgggctagctacaacgatccactct

SEQ ID NO: 4386 - DNA, 31 bp, Artificial Sequence
  Description of Artificial Sequence:  Enzymatic Nucleic Acid
caatccagggctagctacaacgacaggtatg

SEQ ID NO: 4387 - DNA, 31 bp, Artificial Sequence
  Description of Artificial Sequence:  Enzymatic Nucleic Acid
cacacttgggctagctacaacgattgtgttg

SEQ ID NO: 4388 - DNA, 31 bp, Artificial Sequence
  Description of Artificial Sequence:  Enzymatic Nucleic Acid
gaaacacaggctagctacaacgattgcttgt

SEQ ID NO: 4389 - DNA, 31 bp, Artificial Sequence
  Description of Artificial Sequence:  Enzymatic Nucleic Acid
atgttctgggctagctacaacgatgaaacac

SEQ ID NO: 4390 - DNA, 31 bp, Artificial Sequence
  Description of Artificial Sequence:  Enzymatic Nucleic Acid
caaatgagggctagctacaacgactcccgag

SEQ ID NO: 4391 - DNA, 31 bp, Artificial Sequence
  Description of Artificial Sequence:  Enzymatic Nucleic Acid
atcagaagggctagctacaacgacacaaatg

SEQ ID NO: 4392 - DNA, 31 bp, Artificial Sequence
  Description of Artificial Sequence:  Enzymatic Nucleic Acid
tgatttggggctagctacaacgacaggtggg

SEQ ID NO: 4393 - DNA, 31 bp, Artificial Sequence
  Description of Artificial Sequence:  Enzymatic Nucleic Acid
aatttccgggctagctacaacgacttcaggt

SEQ ID NO: 4394 - DNA, 31 bp, Artificial Sequence
  Description of Artificial Sequence:  Enzymatic Nucleic Acid
tgagactgggctagctacaacgaccccgtga

SEQ ID NO: 4395 - DNA, 31 bp, Artificial Sequence
  Description of Artificial Sequence:  Enzymatic Nucleic Acid
taatgagaggctagctacaacgatgcccccg

SEQ ID NO: 4396 - DNA, 31 bp, Artificial Sequence
  Description of Artificial Sequence:  Enzymatic Nucleic Acid
cccaggagggctagctacaacgatgtccaag

SEQ ID NO: 4397 - DNA, 31 bp, Artificial Sequence
  Description of Artificial Sequence:  Enzymatic Nucleic Acid
cttgtgagggctagctacaacgatgttccat

SEQ ID NO: 4398 - DNA, 31 bp, Artificial Sequence
  Description of Artificial Sequence:  Enzymatic Nucleic Acid
atgatataggctagctacaacgattgtgagc

SEQ ID NO: 4399 - DNA, 31 bp, Artificial Sequence
  Description of Artificial Sequence:  Enzymatic Nucleic Acid
tacttgtaggctagctacaacgattattcga

SEQ ID NO: 4400 - DNA, 31 bp, Artificial Sequence
  Description of Artificial Sequence:  Enzymatic Nucleic Acid
caagaataggctagctacaacgattgtactt

SEQ ID NO: 4401 - DNA, 31 bp, Artificial Sequence
  Description of Artificial Sequence:  Enzymatic Nucleic Acid
tcattgaaggctagctacaacgattgtctct

SEQ ID NO: 4402 - DNA, 31 bp, Artificial Sequence
  Description of Artificial Sequence:  Enzymatic Nucleic Acid
agtattcaggctagctacaacgattgaagag

SEQ ID NO: 4403 - DNA, 31 bp, Artificial Sequence
  Description of Artificial Sequence:  Enzymatic Nucleic Acid
agagttggggctagctacaacgattcctttg

SEQ ID NO: 4404 - DNA, 31 bp, Artificial Sequence
  Description of Artificial Sequence:  Enzymatic Nucleic Acid
caaaaagaggctagctacaacgattcctcag

SEQ ID NO: 4405 - DNA, 31 bp, Artificial Sequence
  Description of Artificial Sequence:  Enzymatic Nucleic Acid
gatctgtgggctagctacaacgacattttca

SEQ ID NO: 4406 - DNA, 31 bp, Artificial Sequence
  Description of Artificial Sequence:  Enzymatic Nucleic Acid
atcaacagggctagctacaacgactgaatag

SEQ ID NO: 4407 - DNA, 31 bp, Artificial Sequence
  Description of Artificial Sequence:  Enzymatic Nucleic Acid
cagatcgaggctagctacaacgacttatcaa

SEQ ID NO: 4408 - DNA, 31 bp, Artificial Sequence
  Description of Artificial Sequence:  Enzymatic Nucleic Acid
caaagataggctagctacaacgatcgtgcaa

SEQ ID NO: 4409 - DNA, 31 bp, Artificial Sequence
  Description of Artificial Sequence:  Enzymatic Nucleic Acid
catcaggaggctagctacaacgataggtgtc

SEQ ID NO: 4410 - DNA, 31 bp, Artificial Sequence
  Description of Artificial Sequence:  Enzymatic Nucleic Acid
ggagcagaggctagctacaacgagtttcatc

SEQ ID NO: 4411 - DNA, 31 bp, Artificial Sequence
  Description of Artificial Sequence:  Enzymatic Nucleic Acid
gaatggtgggctagctacaacgatgttgata

SEQ ID NO: 4412 - DNA, 31 bp, Artificial Sequence
  Description of Artificial Sequence:  Enzymatic Nucleic Acid
tgtgaatgggctagctacaacgacaggaatg

SEQ ID NO: 4413 - DNA, 31 bp, Artificial Sequence
  Description of Artificial Sequence:  Enzymatic Nucleic Acid
cctatccaggctagctacaacgattccacat

SEQ ID NO: 4414 - DNA, 31 bp, Artificial Sequence
  Description of Artificial Sequence:  Enzymatic Nucleic Acid
attgacagggctagctacaacgatgcagttc

SEQ ID NO: 4415 - DNA, 31 bp, Artificial Sequence
  Description of Artificial Sequence:  Enzymatic Nucleic Acid
gccctaggggctagctacaacgatattgaca

SEQ ID NO: 4416 - DNA, 31 bp, Artificial Sequence
  Description of Artificial Sequence:  Enzymatic Nucleic Acid
aaattcagggctagctacaacgacctaggct

SEQ ID NO: 4417 - DNA, 31 bp, Artificial Sequence
  Description of Artificial Sequence:  Enzymatic Nucleic Acid
gtatatcgggctagctacaacgacccctaca

SEQ ID NO: 4418 - DNA, 31 bp, Artificial Sequence
  Description of Artificial Sequence:  Enzymatic Nucleic Acid
taaatgtaggctagctacaacgatatataca

SEQ ID NO: 4419 - DNA, 31 bp, Artificial Sequence
  Description of Artificial Sequence:  Enzymatic Nucleic Acid
ttttatcgggctagctacaacgacccctaca

SEQ ID NO: 4420 - DNA, 31 bp, Artificial Sequence
  Description of Artificial Sequence:  Enzymatic Nucleic Acid
cacatccaggctagctacaacgattgtacca

SEQ ID NO: 4421 - DNA, 31 bp, Artificial Sequence
  Description of Artificial Sequence:  Enzymatic Nucleic Acid
attccacaggctagctacaacgaccatttgt

SEQ ID NO: 4422 - DNA, 31 bp, Artificial Sequence
  Description of Artificial Sequence:  Enzymatic Nucleic Acid
caattataggctagctacaacgatccacatc

SEQ ID NO: 4423 - DNA, 31 bp, Artificial Sequence
  Description of Artificial Sequence:  Enzymatic Nucleic Acid
atattcaaggctagctacaacgatatattcc

SEQ ID NO: 4424 - DNA, 31 bp, Artificial Sequence
  Description of Artificial Sequence:  Enzymatic Nucleic Acid
agaaaataggctagctacaacgatcaattat

SEQ ID NO: 4425 - DNA, 31 bp, Artificial Sequence
  Description of Artificial Sequence:  Enzymatic Nucleic Acid
tatttccaggctagctacaacgactgccttc

SEQ ID NO: 4426 - DNA, 31 bp, Artificial Sequence
  Description of Artificial Sequence:  Enzymatic Nucleic Acid
tgtaaataggctagctacaacgattccatct

SEQ ID NO: 4427 - DNA, 31 bp, Artificial Sequence
  Description of Artificial Sequence:  Enzymatic Nucleic Acid
gtctcaaaggctagctacaacgatgcgtact

SEQ ID NO: 4428 - DNA, 31 bp, Artificial Sequence
  Description of Artificial Sequence:  Enzymatic Nucleic Acid
tatcttagggctagctacaacgactcaaatt

SEQ ID NO: 4429 - DNA, 31 bp, Artificial Sequence
  Description of Artificial Sequence:  Enzymatic Nucleic Acid
taacaataggctagctacaacgacttagtct

SEQ ID NO: 4430 - DNA, 31 bp, Artificial Sequence
  Description of Artificial Sequence:  Enzymatic Nucleic Acid
tgctcttgggctagctacaacgacttcaata

SEQ ID NO: 4431 - DNA, 31 bp, Artificial Sequence
  Description of Artificial Sequence:  Enzymatic Nucleic Acid
ttttactaggctagctacaacgatgctcttg

SEQ ID NO: 4432 - DNA, 31 bp, Artificial Sequence
  Description of Artificial Sequence:  Enzymatic Nucleic Acid
ctgatgtgggctagctacaacgatttactat

SEQ ID NO: 4433 - DNA, 31 bp, Artificial Sequence
  Description of Artificial Sequence:  Enzymatic Nucleic Acid
atcacaggggctagctacaacgactttaacc

SEQ ID NO: 4434 - DNA, 31 bp, Artificial Sequence
  Description of Artificial Sequence:  Enzymatic Nucleic Acid
gtggtttaggctagctacaacgacacaggtc

SEQ ID NO: 4435 - DNA, 31 bp, Artificial Sequence
  Description of Artificial Sequence:  Enzymatic Nucleic Acid
ggaagtggggctagctacaacgattatcaca

SEQ ID NO: 4436 - DNA, 31 bp, Artificial Sequence
  Description of Artificial Sequence:  Enzymatic Nucleic Acid
ccaacttaggctagctacaacgacggaagtg

SEQ ID NO: 4437 - DNA, 31 bp, Artificial Sequence
  Description of Artificial Sequence:  Enzymatic Nucleic Acid
gacacacgggctagctacaacgattccaact

SEQ ID NO: 4438 - DNA, 31 bp, Artificial Sequence
  Description of Artificial Sequence:  Enzymatic Nucleic Acid
ctttaccaggctagctacaacgatatatata

SEQ ID NO: 4439 - DNA, 31 bp, Artificial Sequence
  Description of Artificial Sequence:  Enzymatic Nucleic Acid
cgaaggtgggctagctacaacgactttcttt

SEQ ID NO: 4440 - DNA, 31 bp, Artificial Sequence
  Description of Artificial Sequence:  Enzymatic Nucleic Acid
aatgcgggggctagctacaacgatacgaagg

SEQ ID NO: 4441 - DNA, 31 bp, Artificial Sequence
  Description of Artificial Sequence:  Enzymatic Nucleic Acid
ccctgtgaggctagctacaacgatcctctct

SEQ ID NO: 4442 - DNA, 31 bp, Artificial Sequence
  Description of Artificial Sequence:  Enzymatic Nucleic Acid
gctgtacaggctagctacaacgactccctgt

SEQ ID NO: 4443 - DNA, 31 bp, Artificial Sequence
  Description of Artificial Sequence:  Enzymatic Nucleic Acid
tggccccaggctagctacaacgatgctgtac

SEQ ID NO: 4444 - DNA, 31 bp, Artificial Sequence
  Description of Artificial Sequence:  Enzymatic Nucleic Acid
gtgaagaaggctagctacaacgacaagatga

SEQ ID NO: 4445 - DNA, 31 bp, Artificial Sequence
  Description of Artificial Sequence:  Enzymatic Nucleic Acid
tgagtgaaggctagctacaacgatactcagg

SEQ ID NO: 4446 - DNA, 31 bp, Artificial Sequence
  Description of Artificial Sequence:  Enzymatic Nucleic Acid
cattgttgggctagctacaacgatcagctga

SEQ ID NO: 4447 - DNA, 31 bp, Artificial Sequence
  Description of Artificial Sequence:  Enzymatic Nucleic Acid
agccattgggctagctacaacgatgttcagc

SEQ ID NO: 4448 - DNA, 31 bp, Artificial Sequence
  Description of Artificial Sequence:  Enzymatic Nucleic Acid
catagccaggctagctacaacgatgttgttc

SEQ ID NO: 4449 - DNA, 31 bp, Artificial Sequence
  Description of Artificial Sequence:  Enzymatic Nucleic Acid
ggggtcgaggctagctacaacgatgcaacga

SEQ ID NO: 4450 - DNA, 31 bp, Artificial Sequence
  Description of Artificial Sequence:  Enzymatic Nucleic Acid
cattggggggctagctacaacgacgattgca

SEQ ID NO: 4451 - DNA, 31 bp, Artificial Sequence
  Description of Artificial Sequence:  Enzymatic Nucleic Acid
ctggcacaggctagctacaacgatggggtcg

SEQ ID NO: 4452 - DNA, 31 bp, Artificial Sequence
  Description of Artificial Sequence:  Enzymatic Nucleic Acid
gtgtttcaggctagctacaacgacttctggc

SEQ ID NO: 4453 - DNA, 31 bp, Artificial Sequence
  Description of Artificial Sequence:  Enzymatic Nucleic Acid
aatgagtgggctagctacaacgattcatctt

SEQ ID NO: 4454 - DNA, 31 bp, Artificial Sequence
  Description of Artificial Sequence:  Enzymatic Nucleic Acid
tttatttgggctagctacaacgatgaatgag

SEQ ID NO: 4455 - DNA, 31 bp, Artificial Sequence
  Description of Artificial Sequence:  Enzymatic Nucleic Acid
gtcctttaggctagctacaacgattgttgaa

SEQ ID NO: 4456 - DNA, 31 bp, Artificial Sequence
  Description of Artificial Sequence:  Enzymatic Nucleic Acid
tcaccatgggctagctacaacgacctttatt

SEQ ID NO: 4457 - DNA, 31 bp, Artificial Sequence
  Description of Artificial Sequence:  Enzymatic Nucleic Acid
tgcctgggggctagctacaacgacaccatgt

SEQ ID NO: 4458 - DNA, 31 bp, Artificial Sequence
  Description of Artificial Sequence:  Enzymatic Nucleic Acid
aaataaaaggctagctacaacgacgctttcc

SEQ ID NO: 4459 - DNA, 31 bp, Artificial Sequence
  Description of Artificial Sequence:  Enzymatic Nucleic Acid
tggcaacaggctagctacaacgattttgaaa

SEQ ID NO: 4460 - DNA, 31 bp, Artificial Sequence
  Description of Artificial Sequence:  Enzymatic Nucleic Acid
ttcaggaaggctagctacaacgacaaaatgg

SEQ ID NO: 4461 - DNA, 31 bp, Artificial Sequence
  Description of Artificial Sequence:  Enzymatic Nucleic Acid
cttccatgggctagctacaacgattcaggaa

SEQ ID NO: 4462 - DNA, 31 bp, Artificial Sequence
  Description of Artificial Sequence:  Enzymatic Nucleic Acid
agcctttgggctagctacaacgacttccatg

SEQ ID NO: 4463 - DNA, 31 bp, Artificial Sequence
  Description of Artificial Sequence:  Enzymatic Nucleic Acid
tcacatagggctagctacaacgacagccttt

SEQ ID NO: 4464 - DNA, 31 bp, Artificial Sequence
  Description of Artificial Sequence:  Enzymatic Nucleic Acid
agttttggggctagctacaacgactcacata

SEQ ID NO: 4465 - DNA, 31 bp, Artificial Sequence
  Description of Artificial Sequence:  Enzymatic Nucleic Acid
gtctcaagggctagctacaacgatttggtct

SEQ ID NO: 4466 - DNA, 31 bp, Artificial Sequence
  Description of Artificial Sequence:  Enzymatic Nucleic Acid
tttgtaggggctagctacaacgactcaagtt

SEQ ID NO: 4467 - DNA, 31 bp, Artificial Sequence
  Description of Artificial Sequence:  Enzymatic Nucleic Acid
catcagcaggctagctacaacgattttgtag

SEQ ID NO: 4468 - DNA, 31 bp, Artificial Sequence
  Description of Artificial Sequence:  Enzymatic Nucleic Acid
ccagaacaggctagctacaacgacagcattt

SEQ ID NO: 4469 - DNA, 31 bp, Artificial Sequence
  Description of Artificial Sequence:  Enzymatic Nucleic Acid
gttcatcaggctagctacaacgatacctgga

SEQ ID NO: 4470 - DNA, 31 bp, Artificial Sequence
  Description of Artificial Sequence:  Enzymatic Nucleic Acid
agggttcaggctagctacaacgacattacct

SEQ ID NO: 4471 - DNA, 31 bp, Artificial Sequence
  Description of Artificial Sequence:  Enzymatic Nucleic Acid
gtgtagggggctagctacaacgatcatcatt

SEQ ID NO: 4472 - DNA, 31 bp, Artificial Sequence
  Description of Artificial Sequence:  Enzymatic Nucleic Acid
gttgcccaggctagctacaacgactgctcag

SEQ ID NO: 4473 - DNA, 31 bp, Artificial Sequence
  Description of Artificial Sequence:  Enzymatic Nucleic Acid
ctccacagggctagctacaacgatgcccatc

SEQ ID NO: 4474 - DNA, 31 bp, Artificial Sequence
  Description of Artificial Sequence:  Enzymatic Nucleic Acid
gaggtggaggctagctacaacgacctttcac

SEQ ID NO: 4475 - DNA, 31 bp, Artificial Sequence
  Description of Artificial Sequence:  Enzymatic Nucleic Acid
caatgaaaggctagctacaacgacaggagtg

SEQ ID NO: 4476 - DNA, 31 bp, Artificial Sequence
  Description of Artificial Sequence:  Enzymatic Nucleic Acid
ggtccataggctagctacaacgatcagctaa

SEQ ID NO: 4477 - DNA, 31 bp, Artificial Sequence
  Description of Artificial Sequence:  Enzymatic Nucleic Acid
ccttgtggggctagctacaacgaccatattc

SEQ ID NO: 4478 - DNA, 31 bp, Artificial Sequence
  Description of Artificial Sequence:  Enzymatic Nucleic Acid
actccccaggctagctacaacgacgtagatg

SEQ ID NO: 4479 - DNA, 31 bp, Artificial Sequence
  Description of Artificial Sequence:  Enzymatic Nucleic Acid
tgtactcgggctagctacaacgacaaatact

SEQ ID NO: 4480 - DNA, 31 bp, Artificial Sequence
  Description of Artificial Sequence:  Enzymatic Nucleic Acid
catcattaggctagctacaacgatgtactcg

SEQ ID NO: 4481 - DNA, 31 bp, Artificial Sequence
  Description of Artificial Sequence:  Enzymatic Nucleic Acid
tctcatcaggctagctacaacgatattgtac

SEQ ID NO: 4482 - DNA, 31 bp, Artificial Sequence
  Description of Artificial Sequence:  Enzymatic Nucleic Acid
atttctcaggctagctacaacgacattattg

SEQ ID NO: 4483 - DNA, 31 bp, Artificial Sequence
  Description of Artificial Sequence:  Enzymatic Nucleic Acid
aagtagaaggctagctacaacgattctcatc

SEQ ID NO: 4484 - DNA, 31 bp, Artificial Sequence
  Description of Artificial Sequence:  Enzymatic Nucleic Acid
ttcttccaggctagctacaacgatggataag

SEQ ID NO: 4485 - DNA, 31 bp, Artificial Sequence
  Description of Artificial Sequence:  Enzymatic Nucleic Acid
tgcttgtaggctagctacaacgatcttccat

SEQ ID NO: 4486 - DNA, 31 bp, Artificial Sequence
  Description of Artificial Sequence:  Enzymatic Nucleic Acid
gctgaacaggctagctacaacgacttactgc

SEQ ID NO: 4487 - DNA, 31 bp, Artificial Sequence
  Description of Artificial Sequence:  Enzymatic Nucleic Acid
ttactacaggctagctacaacgattgtacca

SEQ ID NO: 4488 - DNA, 31 bp, Artificial Sequence
  Description of Artificial Sequence:  Enzymatic Nucleic Acid
aatgtgcaggctagctacaacgacttttggt

SEQ ID NO: 4489 - DNA, 31 bp, Artificial Sequence
  Description of Artificial Sequence:  Enzymatic Nucleic Acid
taactttaggctagctacaacgatgaatgtg

SEQ ID NO: 4490 - DNA, 31 bp, Artificial Sequence
  Description of Artificial Sequence:  Enzymatic Nucleic Acid
tcatagagggctagctacaacgacctgtaac

SEQ ID NO: 4491 - DNA, 31 bp, Artificial Sequence
  Description of Artificial Sequence:  Enzymatic Nucleic Acid
aactcacaggctagctacaacgacctttttc

SEQ ID NO: 4492 - DNA, 31 bp, Artificial Sequence
  Description of Artificial Sequence:  Enzymatic Nucleic Acid
tggcgggaggctagctacaacgatggagaac

SEQ ID NO: 4493 - DNA, 31 bp, Artificial Sequence
  Description of Artificial Sequence:  Enzymatic Nucleic Acid
cttctccgggctagctacaacgactggcggg

SEQ ID NO: 4494 - DNA, 31 bp, Artificial Sequence
  Description of Artificial Sequence:  Enzymatic Nucleic Acid
tgcaaacaggctagctacaacgatatagaag

SEQ ID NO: 4495 - DNA, 31 bp, Artificial Sequence
  Description of Artificial Sequence:  Enzymatic Nucleic Acid
tcaacatgggctagctacaacgatgtgcaaa

SEQ ID NO: 4496 - DNA, 31 bp, Artificial Sequence
  Description of Artificial Sequence:  Enzymatic Nucleic Acid
ctatagaaggctagctacaacgacaacatgt

SEQ ID NO: 4497 - DNA, 31 bp, Artificial Sequence
  Description of Artificial Sequence:  Enzymatic Nucleic Acid
gtacagaaggctagctacaacgatcaactat

SEQ ID NO: 4498 - DNA, 31 bp, Artificial Sequence
  Description of Artificial Sequence:  Enzymatic Nucleic Acid
tggttttgggctagctacaacgatctgtaca

SEQ ID NO: 4499 - DNA, 31 bp, Artificial Sequence
  Description of Artificial Sequence:  Enzymatic Nucleic Acid
tgttgtggggctagctacaacgatttgttct

SEQ ID NO: 4500 - DNA, 31 bp, Artificial Sequence
  Description of Artificial Sequence:  Enzymatic Nucleic Acid
cttctttgggctagctacaacgatgtggttt

SEQ ID NO: 4501 - DNA, 31 bp, Artificial Sequence
  Description of Artificial Sequence:  Enzymatic Nucleic Acid
tttgcttgggctagctacaacgattggagct

SEQ ID NO: 4502 - DNA, 31 bp, Artificial Sequence
  Description of Artificial Sequence:  Enzymatic Nucleic Acid
atttttgaggctagctacaacgatttgcttg

SEQ ID NO: 4503 - DNA, 31 bp, Artificial Sequence
  Description of Artificial Sequence:  Enzymatic Nucleic Acid
agattgcaggctagctacaacgattttgatt

SEQ ID NO: 4504 - DNA, 31 bp, Artificial Sequence
  Description of Artificial Sequence:  Enzymatic Nucleic Acid
ttcggagaggctagctacaacgatgcatttt

SEQ ID NO: 4505 - DNA, 31 bp, Artificial Sequence
  Description of Artificial Sequence:  Enzymatic Nucleic Acid
atcacggaggctagctacaacgacacttccc

SEQ ID NO: 4506 - DNA, 31 bp, Artificial Sequence
  Description of Artificial Sequence:  Enzymatic Nucleic Acid
cctcagaaggctagctacaacgacacggatc

SEQ ID NO: 4507 - DNA, 31 bp, Artificial Sequence
  Description of Artificial Sequence:  Enzymatic Nucleic Acid
tcttaaagggctagctacaacgacctcagaa

SEQ ID NO: 4508 - DNA, 31 bp, Artificial Sequence
  Description of Artificial Sequence:  Enzymatic Nucleic Acid
aggagtggggctagctacaacgatttcttaa

SEQ ID NO: 4509 - DNA, 31 bp, Artificial Sequence
  Description of Artificial Sequence:  Enzymatic Nucleic Acid
ctgtgttgggctagctacaacgacataggag

SEQ ID NO: 4510 - DNA, 31 bp, Artificial Sequence
  Description of Artificial Sequence:  Enzymatic Nucleic Acid
tggctgtgggctagctacaacgatgtcatag

SEQ ID NO: 4511 - DNA, 31 bp, Artificial Sequence
  Description of Artificial Sequence:  Enzymatic Nucleic Acid
aggtgggaggctagctacaacgattggtggc

SEQ ID NO: 4512 - DNA, 31 bp, Artificial Sequence
  Description of Artificial Sequence:  Enzymatic Nucleic Acid
ttgtccaaggctagctacaacgactgcagca

SEQ ID NO: 4513 - DNA, 31 bp, Artificial Sequence
  Description of Artificial Sequence:  Enzymatic Nucleic Acid
attctttgggctagctacaacgaccaatctg

SEQ ID NO: 4514 - DNA, 31 bp, Artificial Sequence
  Description of Artificial Sequence:  Enzymatic Nucleic Acid
acacacaaggctagctacaacgatctttgtc

SEQ ID NO: 4515 - DNA, 31 bp, Artificial Sequence
  Description of Artificial Sequence:  Enzymatic Nucleic Acid
cagatttgggctagctacaacgacaaggact

SEQ ID NO: 4516 - DNA, 31 bp, Artificial Sequence
  Description of Artificial Sequence:  Enzymatic Nucleic Acid
cttccagaggctagctacaacgattgtcaag

SEQ ID NO: 4517 - DNA, 31 bp, Artificial Sequence
  Description of Artificial Sequence:  Enzymatic Nucleic Acid
gttaccagggctagctacaacgacgccatgc

SEQ ID NO: 4518 - DNA, 31 bp, Artificial Sequence
  Description of Artificial Sequence:  Enzymatic Nucleic Acid
tgaggcggggctagctacaacgataccagtc

SEQ ID NO: 4519 - DNA, 31 bp, Artificial Sequence
  Description of Artificial Sequence:  Enzymatic Nucleic Acid
tcagtcgaggctagctacaacgatgaggcgg

SEQ ID NO: 4520 - DNA, 31 bp, Artificial Sequence
  Description of Artificial Sequence:  Enzymatic Nucleic Acid
tgattcagggctagctacaacgacgattgag

SEQ ID NO: 4521 - DNA, 31 bp, Artificial Sequence
  Description of Artificial Sequence:  Enzymatic Nucleic Acid
ctgcttgaggctagctacaacgatcagtcga

SEQ ID NO: 4522 - DNA, 31 bp, Artificial Sequence
  Description of Artificial Sequence:  Enzymatic Nucleic Acid
ctcaactgggctagctacaacgactgcagca

SEQ ID NO: 4523 - DNA, 31 bp, Artificial Sequence
  Description of Artificial Sequence:  Enzymatic Nucleic Acid
tgtcaccaggctagctacaacgacccaaccc

SEQ ID NO: 4524 - DNA, 31 bp, Artificial Sequence
  Description of Artificial Sequence:  Enzymatic Nucleic Acid
gtcaaatgggctagctacaacgacaccatcc

SEQ ID NO: 4525 - DNA, 31 bp, Artificial Sequence
  Description of Artificial Sequence:  Enzymatic Nucleic Acid
cagcactgggctagctacaacgacaaatgtc

SEQ ID NO: 4526 - DNA, 31 bp, Artificial Sequence
  Description of Artificial Sequence:  Enzymatic Nucleic Acid
tgtatgagggctagctacaacgatcactttg

SEQ ID NO: 4527 - DNA, 31 bp, Artificial Sequence
  Description of Artificial Sequence:  Enzymatic Nucleic Acid
actgtttaggctagctacaacgactgtatga

SEQ ID NO: 4528 - DNA, 31 bp, Artificial Sequence
  Description of Artificial Sequence:  Enzymatic Nucleic Acid
tgccactgggctagctacaacgattatctgt

SEQ ID NO: 4529 - DNA, 31 bp, Artificial Sequence
  Description of Artificial Sequence:  Enzymatic Nucleic Acid
tgtccctgggctagctacaacgacactgcca

SEQ ID NO: 4530 - DNA, 31 bp, Artificial Sequence
  Description of Artificial Sequence:  Enzymatic Nucleic Acid
cgagtgtgggctagctacaacgaccctgtca

SEQ ID NO: 4531 - DNA, 31 bp, Artificial Sequence
  Description of Artificial Sequence:  Enzymatic Nucleic Acid
gcaggtaaggctagctacaacgacttttggc

SEQ ID NO: 4532 - DNA, 31 bp, Artificial Sequence
  Description of Artificial Sequence:  Enzymatic Nucleic Acid
gatggacgggctagctacaacgaccctcctg

SEQ ID NO: 4533 - DNA, 31 bp, Artificial Sequence
  Description of Artificial Sequence:  Enzymatic Nucleic Acid
aatgccgaggctagctacaacgacgaagccc

SEQ ID NO: 4534 - DNA, 31 bp, Artificial Sequence
  Description of Artificial Sequence:  Enzymatic Nucleic Acid
cttcctaaggctagctacaacgacacagtaa

SEQ ID NO: 4535 - DNA, 31 bp, Artificial Sequence
  Description of Artificial Sequence:  Enzymatic Nucleic Acid
gttggataggctagctacaacgattcttcct

SEQ ID NO: 4536 - DNA, 31 bp, Artificial Sequence
  Description of Artificial Sequence:  Enzymatic Nucleic Acid
tccatcagggctagctacaacgatggatatt

SEQ ID NO: 4537 - DNA, 31 bp, Artificial Sequence
  Description of Artificial Sequence:  Enzymatic Nucleic Acid
cagatccaggctagctacaacgacagttgga

SEQ ID NO: 4538 - DNA, 31 bp, Artificial Sequence
  Description of Artificial Sequence:  Enzymatic Nucleic Acid
atttcagaggctagctacaacgaccatcagt

SEQ ID NO: 4539 - DNA, 31 bp, Artificial Sequence
  Description of Artificial Sequence:  Enzymatic Nucleic Acid
cagcacaaggctagctacaacgattcagatc

SEQ ID NO: 4540 - DNA, 31 bp, Artificial Sequence
  Description of Artificial Sequence:  Enzymatic Nucleic Acid
cccatccgggctagctacaacgacagcagca

SEQ ID NO: 4541 - DNA, 31 bp, Artificial Sequence
  Description of Artificial Sequence:  Enzymatic Nucleic Acid
cttccccaggctagctacaacgaccgtcagc

SEQ ID NO: 4542 - DNA, 31 bp, Artificial Sequence
  Description of Artificial Sequence:  Enzymatic Nucleic Acid
tagtgttgggctagctacaacgacttcccca

SEQ ID NO: 4543 - DNA, 31 bp, Artificial Sequence
  Description of Artificial Sequence:  Enzymatic Nucleic Acid
ttatagtgggctagctacaacgatgtcttcc

SEQ ID NO: 4544 - DNA, 31 bp, Artificial Sequence
  Description of Artificial Sequence:  Enzymatic Nucleic Acid
tgacctcgggctagctacaacgataaagcac

SEQ ID NO: 4545 - DNA, 31 bp, Artificial Sequence
  Description of Artificial Sequence:  Enzymatic Nucleic Acid
ccactttgggctagctacaacgattgacctc

SEQ ID NO: 4546 - DNA, 31 bp, Artificial Sequence
  Description of Artificial Sequence:  Enzymatic Nucleic Acid
tcctctagggctagctacaacgatcttgagc

SEQ ID NO: 4547 - DNA, 31 bp, Artificial Sequence
  Description of Artificial Sequence:  Enzymatic Nucleic Acid
tcctgtcaggctagctacaacgatttggaca

SEQ ID NO: 4548 - DNA, 31 bp, Artificial Sequence
  Description of Artificial Sequence:  Enzymatic Nucleic Acid
acctcctgggctagctacaacgacattttgg

SEQ ID NO: 4549 - DNA, 31 bp, Artificial Sequence
  Description of Artificial Sequence:  Enzymatic Nucleic Acid
agcatatgggctagctacaacgactgtaaac

SEQ ID NO: 4550 - DNA, 31 bp, Artificial Sequence
  Description of Artificial Sequence:  Enzymatic Nucleic Acid
gaacttgaggctagctacaacgactgaagca

SEQ ID NO: 4551 - DNA, 31 bp, Artificial Sequence
  Description of Artificial Sequence:  Enzymatic Nucleic Acid
ggccattgggctagctacaacgatctgaact

SEQ ID NO: 4552 - DNA, 31 bp, Artificial Sequence
  Description of Artificial Sequence:  Enzymatic Nucleic Acid
tgaggccaggctagctacaacgatgttctga

SEQ ID NO: 4553 - DNA, 31 bp, Artificial Sequence
  Description of Artificial Sequence:  Enzymatic Nucleic Acid
caaaagcaggctagctacaacgacaatgagg

SEQ ID NO: 4554 - DNA, 31 bp, Artificial Sequence
  Description of Artificial Sequence:  Enzymatic Nucleic Acid
cagctccaggctagctacaacgattcctgat

SEQ ID NO: 4555 - DNA, 31 bp, Artificial Sequence
  Description of Artificial Sequence:  Enzymatic Nucleic Acid
agggttaaggctagctacaacgacccttact

SEQ ID NO: 4556 - DNA, 31 bp, Artificial Sequence
  Description of Artificial Sequence:  Enzymatic Nucleic Acid
ctggagggggctagctacaacgataatccct

SEQ ID NO: 4557 - DNA, 31 bp, Artificial Sequence
  Description of Artificial Sequence:  Enzymatic Nucleic Acid
actggctgggctagctacaacgatctggagg

SEQ ID NO: 4558 - DNA, 31 bp, Artificial Sequence
  Description of Artificial Sequence:  Enzymatic Nucleic Acid
gccattcaggctagctacaacgaccactggc

SEQ ID NO: 4559 - DNA, 31 bp, Artificial Sequence
  Description of Artificial Sequence:  Enzymatic Nucleic Acid
ctgtgccaggctagctacaacgatcatccac

SEQ ID NO: 4560 - DNA, 31 bp, Artificial Sequence
  Description of Artificial Sequence:  Enzymatic Nucleic Acid
gtccacgaggctagctacaacgacactgtgc

SEQ ID NO: 4561 - DNA, 31 bp, Artificial Sequence
  Description of Artificial Sequence:  Enzymatic Nucleic Acid
cggtgctgggctagctacaacgaccacgatc

SEQ ID NO: 4562 - DNA, 31 bp, Artificial Sequence
  Description of Artificial Sequence:  Enzymatic Nucleic Acid
acaaagtgggctagctacaacgacctttccc

SEQ ID NO: 4563 - DNA, 31 bp, Artificial Sequence
  Description of Artificial Sequence:  Enzymatic Nucleic Acid
ctgcgttgggctagctacaacgaccaggtga

SEQ ID NO: 4564 - DNA, 31 bp, Artificial Sequence
  Description of Artificial Sequence:  Enzymatic Nucleic Acid
aggctgcgggctagctacaacgatgtccagg

SEQ ID NO: 4565 - DNA, 31 bp, Artificial Sequence
  Description of Artificial Sequence:  Enzymatic Nucleic Acid
gagaaggaggctagctacaacgattggggag

SEQ ID NO: 4566 - DNA, 31 bp, Artificial Sequence
  Description of Artificial Sequence:  Enzymatic Nucleic Acid
cactgggaggctagctacaacgacccagaga

SEQ ID NO: 4567 - DNA, 31 bp, Artificial Sequence
  Description of Artificial Sequence:  Enzymatic Nucleic Acid
tgcttctgggctagctacaacgaccactggg

SEQ ID NO: 4568 - DNA, 31 bp, Artificial Sequence
  Description of Artificial Sequence:  Enzymatic Nucleic Acid
tgtttttgggctagctacaacgaccactaca

SEQ ID NO: 4569 - DNA, 31 bp, Artificial Sequence
  Description of Artificial Sequence:  Enzymatic Nucleic Acid
ttttggtgggctagctacaacgattttgtcc

SEQ ID NO: 4570 - DNA, 31 bp, Artificial Sequence
  Description of Artificial Sequence:  Enzymatic Nucleic Acid
gtaggccaggctagctacaacgatttggtgt

SEQ ID NO: 4571 - DNA, 31 bp, Artificial Sequence
  Description of Artificial Sequence:  Enzymatic Nucleic Acid
gcctgggaggctagctacaacgattggaggt

SEQ ID NO: 4572 - DNA, 31 bp, Artificial Sequence
  Description of Artificial Sequence:  Enzymatic Nucleic Acid
agactgtaggctagctacaacgattccaagt

SEQ ID NO: 4573 - DNA, 31 bp, Artificial Sequence
  Description of Artificial Sequence:  Enzymatic Nucleic Acid
ggtcaaggggctagctacaacgattgtgagc

SEQ ID NO: 4574 - DNA, 31 bp, Artificial Sequence
  Description of Artificial Sequence:  Enzymatic Nucleic Acid
agtcagggggctagctacaacgacaaggttt

SEQ ID NO: 4575 - DNA, 31 bp, Artificial Sequence
  Description of Artificial Sequence:  Enzymatic Nucleic Acid
cgtgacagggctagctacaacgacagggtca

SEQ ID NO: 4576 - DNA, 31 bp, Artificial Sequence
  Description of Artificial Sequence:  Enzymatic Nucleic Acid
gggtagcaggctagctacaacgatggacgca

SEQ ID NO: 4577 - DNA, 31 bp, Artificial Sequence
  Description of Artificial Sequence:  Enzymatic Nucleic Acid
cactgtaaggctagctacaacgatggaggca

SEQ ID NO: 4578 - DNA, 31 bp, Artificial Sequence
  Description of Artificial Sequence:  Enzymatic Nucleic Acid
tttggaagggctagctacaacgacactgtaa

SEQ ID NO: 4579 - DNA, 31 bp, Artificial Sequence
  Description of Artificial Sequence:  Enzymatic Nucleic Acid
cttgttcgggctagctacaacgatttggaag

SEQ ID NO: 4580 - DNA, 31 bp, Artificial Sequence
  Description of Artificial Sequence:  Enzymatic Nucleic Acid
tgtccttgggctagctacaacgatcgttttg

SEQ ID NO: 4581 - DNA, 31 bp, Artificial Sequence
  Description of Artificial Sequence:  Enzymatic Nucleic Acid
tgctggtgggctagctacaacgaccttgttc

SEQ ID NO: 4582 - DNA, 31 bp, Artificial Sequence
  Description of Artificial Sequence:  Enzymatic Nucleic Acid
ctggggaaggctagctacaacgattgctggt

SEQ ID NO: 4583 - DNA, 31 bp, Artificial Sequence
  Description of Artificial Sequence:  Enzymatic Nucleic Acid
ggcgaataggctagctacaacgattgcataa

SEQ ID NO: 4584 - DNA, 31 bp, Artificial Sequence
  Description of Artificial Sequence:  Enzymatic Nucleic Acid
cctgagaaggctagctacaacgatggggagg

SEQ ID NO: 4585 - DNA, 31 bp, Artificial Sequence
  Description of Artificial Sequence:  Enzymatic Nucleic Acid
tgattcaaggctagctacaacgacagggctg

SEQ ID NO: 4586 - DNA, 31 bp, Artificial Sequence
  Description of Artificial Sequence:  Enzymatic Nucleic Acid
ttcactgaggctagctacaacgatcaatcag

SEQ ID NO: 4587 - DNA, 31 bp, Artificial Sequence
  Description of Artificial Sequence:  Enzymatic Nucleic Acid
tttttccaggctagctacaacgatcactgat

SEQ ID NO: 4588 - DNA, 31 bp, Artificial Sequence
  Description of Artificial Sequence:  Enzymatic Nucleic Acid
ggtaactgggctagctacaacgattttccat

SEQ ID NO: 4589 - DNA, 31 bp, Artificial Sequence
  Description of Artificial Sequence:  Enzymatic Nucleic Acid
tccagtagggctagctacaacgatccaaggt

SEQ ID NO: 4590 - DNA, 31 bp, Artificial Sequence
  Description of Artificial Sequence:  Enzymatic Nucleic Acid
ctccattaggctagctacaacgaccagtagt

SEQ ID NO: 4591 - DNA, 31 bp, Artificial Sequence
  Description of Artificial Sequence:  Enzymatic Nucleic Acid
ctgctccaggctagctacaacgatatccagt

SEQ ID NO: 4592 - DNA, 31 bp, Artificial Sequence
  Description of Artificial Sequence:  Enzymatic Nucleic Acid
tagtagcaggctagctacaacgacagcacct

SEQ ID NO: 4593 - DNA, 31 bp, Artificial Sequence
  Description of Artificial Sequence:  Enzymatic Nucleic Acid
caccgtcaggctagctacaacgaccttagta

SEQ ID NO: 4594 - DNA, 31 bp, Artificial Sequence
  Description of Artificial Sequence:  Enzymatic Nucleic Acid
agacaccgggctagctacaacgacatcctta

SEQ ID NO: 4595 - DNA, 31 bp, Artificial Sequence
  Description of Artificial Sequence:  Enzymatic Nucleic Acid
gtcataagggctagctacaacgatgtgaaat

SEQ ID NO: 4596 - DNA, 31 bp, Artificial Sequence
  Description of Artificial Sequence:  Enzymatic Nucleic Acid
cattcgtgggctagctacaacgacataagtt

SEQ ID NO: 4597 - DNA, 31 bp, Artificial Sequence
  Description of Artificial Sequence:  Enzymatic Nucleic Acid
atctaccaggctagctacaacgatcgtgtca

SEQ ID NO: 4598 - DNA, 31 bp, Artificial Sequence
  Description of Artificial Sequence:  Enzymatic Nucleic Acid
acactgtaggctagctacaacgactaccatt

SEQ ID NO: 4599 - DNA, 31 bp, Artificial Sequence
  Description of Artificial Sequence:  Enzymatic Nucleic Acid
tggctgcgggctagctacaacgataactcct

SEQ ID NO: 4600 - DNA, 31 bp, Artificial Sequence
  Description of Artificial Sequence:  Enzymatic Nucleic Acid
actctccgggctagctacaacgactggctgc

SEQ ID NO: 4601 - DNA, 31 bp, Artificial Sequence
  Description of Artificial Sequence:  Enzymatic Nucleic Acid
ctggggtaggctagctacaacgacactctcc

SEQ ID NO: 4602 - DNA, 31 bp, Artificial Sequence
  Description of Artificial Sequence:  Enzymatic Nucleic Acid
attctcaaggctagctacaacgaccagccag

SEQ ID NO: 4603 - DNA, 31 bp, Artificial Sequence
  Description of Artificial Sequence:  Enzymatic Nucleic Acid
tttcatcaggctagctacaacgatctcaatc

SEQ ID NO: 4604 - DNA, 31 bp, Artificial Sequence
  Description of Artificial Sequence:  Enzymatic Nucleic Acid
gtatttcaggctagctacaacgacattctca

SEQ ID NO: 4605 - DNA, 31 bp, Artificial Sequence
  Description of Artificial Sequence:  Enzymatic Nucleic Acid
ccattgtaggctagctacaacgattcatcat

SEQ ID NO: 4606 - DNA, 31 bp, Artificial Sequence
  Description of Artificial Sequence:  Enzymatic Nucleic Acid
ggattccaggctagctacaacgatgtatttc

SEQ ID NO: 4607 - DNA, 31 bp, Artificial Sequence
  Description of Artificial Sequence:  Enzymatic Nucleic Acid
ttggtggaggctagctacaacgatccattgt

SEQ ID NO: 4608 - DNA, 31 bp, Artificial Sequence
  Description of Artificial Sequence:  Enzymatic Nucleic Acid
atttcaggggctagctacaacgacttggtgg

SEQ ID NO: 4609 - DNA, 31 bp, Artificial Sequence
  Description of Artificial Sequence:  Enzymatic Nucleic Acid
cttattaaggctagctacaacgattcaggtc

SEQ ID NO: 4610 - DNA, 31 bp, Artificial Sequence
  Description of Artificial Sequence:  Enzymatic Nucleic Acid
catccttaggctagctacaacgataatttca

SEQ ID NO: 4611 - DNA, 31 bp, Artificial Sequence
  Description of Artificial Sequence:  Enzymatic Nucleic Acid
gaacatcaggctagctacaacgaccttatta

SEQ ID NO: 4612 - DNA, 31 bp, Artificial Sequence
  Description of Artificial Sequence:  Enzymatic Nucleic Acid
gttgaacaggctagctacaacgacatcctta

SEQ ID NO: 4613 - DNA, 31 bp, Artificial Sequence
  Description of Artificial Sequence:  Enzymatic Nucleic Acid
tgcttgtgggctagctacaacgatgaacatc

SEQ ID NO: 4614 - DNA, 31 bp, Artificial Sequence
  Description of Artificial Sequence:  Enzymatic Nucleic Acid
cgaggatgggctagctacaacgatctgctga

SEQ ID NO: 4615 - DNA, 31 bp, Artificial Sequence
  Description of Artificial Sequence:  Enzymatic Nucleic Acid
ttgggacaggctagctacaacgacagaagcc

SEQ ID NO: 4616 - DNA, 31 bp, Artificial Sequence
  Description of Artificial Sequence:  Enzymatic Nucleic Acid
tgggagcaggctagctacaacgattgggaca

SEQ ID NO: 4617 - DNA, 31 bp, Artificial Sequence
  Description of Artificial Sequence:  Enzymatic Nucleic Acid
ggaagagaggctagctacaacgacaggtatg

SEQ ID NO: 4618 - DNA, 31 bp, Artificial Sequence
  Description of Artificial Sequence:  Enzymatic Nucleic Acid
gtcggtgaggctagctacaacgattggccag

SEQ ID NO: 4619 - DNA, 31 bp, Artificial Sequence
  Description of Artificial Sequence:  Enzymatic Nucleic Acid
ccttcaggggctagctacaacgacggtgatt

SEQ ID NO: 4620 - DNA, 31 bp, Artificial Sequence
  Description of Artificial Sequence:  Enzymatic Nucleic Acid
cccgtgaaggctagctacaacgattccgcct

SEQ ID NO: 4621 - DNA, 31 bp, Artificial Sequence
  Description of Artificial Sequence:  Enzymatic Nucleic Acid
aagtcagaggctagctacaacgataatgaga

SEQ ID NO: 4622 - DNA, 31 bp, Artificial Sequence
  Description of Artificial Sequence:  Enzymatic Nucleic Acid
tgtccaagggctagctacaacgacagattaa

SEQ ID NO: 4623 - DNA, 31 bp, Artificial Sequence
  Description of Artificial Sequence:  Enzymatic Nucleic Acid
aggagctgggctagctacaacgaccaagtca

SEQ ID NO: 4624 - DNA, 31 bp, Artificial Sequence
  Description of Artificial Sequence:  Enzymatic Nucleic Acid
cataatcaggctagctacaacgaccccagga

SEQ ID NO: 4625 - DNA, 31 bp, Artificial Sequence
  Description of Artificial Sequence:  Enzymatic Nucleic Acid
ggtcataaggctagctacaacgacatcccca

SEQ ID NO: 4626 - DNA, 31 bp, Artificial Sequence
  Description of Artificial Sequence:  Enzymatic Nucleic Acid
ttccatggggctagctacaacgacataatca

SEQ ID NO: 4627 - DNA, 31 bp, Artificial Sequence
  Description of Artificial Sequence:  Enzymatic Nucleic Acid
gtgagctgggctagctacaacgatccatggt

SEQ ID NO: 4628 - DNA, 31 bp, Artificial Sequence
  Description of Artificial Sequence:  Enzymatic Nucleic Acid
tgtacttaggctagctacaacgatcgaatga

SEQ ID NO: 4629 - DNA, 31 bp, Artificial Sequence
  Description of Artificial Sequence:  Enzymatic Nucleic Acid
ctctgagaggctagctacaacgacaagaata

SEQ ID NO: 4630 - DNA, 31 bp, Artificial Sequence
  Description of Artificial Sequence:  Enzymatic Nucleic Acid
tgaacttgggctagctacaacgactctgaga

SEQ ID NO: 4631 - DNA, 31 bp, Artificial Sequence
  Description of Artificial Sequence:  Enzymatic Nucleic Acid
gagattcaggctagctacaacgatgaacttg

SEQ ID NO: 4632 - DNA, 31 bp, Artificial Sequence
  Description of Artificial Sequence:  Enzymatic Nucleic Acid
tgaagagaggctagctacaacgatcattgaa

SEQ ID NO: 4633 - DNA, 31 bp, Artificial Sequence
  Description of Artificial Sequence:  Enzymatic Nucleic Acid
cagtagtaggctagctacaacgatcacttga

SEQ ID NO: 4634 - DNA, 31 bp, Artificial Sequence
  Description of Artificial Sequence:  Enzymatic Nucleic Acid
cctcagagggctagctacaacgatggcttcc

SEQ ID NO: 4635 - DNA, 31 bp, Artificial Sequence
  Description of Artificial Sequence:  Enzymatic Nucleic Acid
ttttctggggctagctacaacgattaaacaa

SEQ ID NO: 4636 - DNA, 31 bp, Artificial Sequence
  Description of Artificial Sequence:  Enzymatic Nucleic Acid
aagtaatgggctagctacaacgatttctggt

SEQ ID NO: 4637 - DNA, 31 bp, Artificial Sequence
  Description of Artificial Sequence:  Enzymatic Nucleic Acid
ctgtgccaggctagctacaacgatttcaaaa

SEQ ID NO: 4638 - DNA, 31 bp, Artificial Sequence
  Description of Artificial Sequence:  Enzymatic Nucleic Acid
tgaaaagaggctagctacaacgactgtgcca

SEQ ID NO: 4639 - DNA, 31 bp, Artificial Sequence
  Description of Artificial Sequence:  Enzymatic Nucleic Acid
cgaccttaggctagctacaacgacaacagcc

SEQ ID NO: 4640 - DNA, 31 bp, Artificial Sequence
  Description of Artificial Sequence:  Enzymatic Nucleic Acid
atttcagaggctagctacaacgacgacctta

SEQ ID NO: 4641 - DNA, 31 bp, Artificial Sequence
  Description of Artificial Sequence:  Enzymatic Nucleic Acid
atttctgaggctagctacaacgattcagatc

SEQ ID NO: 4642 - DNA, 31 bp, Artificial Sequence
  Description of Artificial Sequence:  Enzymatic Nucleic Acid
gttggataggctagctacaacgattctgatt

SEQ ID NO: 4643 - DNA, 31 bp, Artificial Sequence
  Description of Artificial Sequence:  Enzymatic Nucleic Acid
gtgcaatgggctagctacaacgatggatatt

SEQ ID NO: 4644 - DNA, 31 bp, Artificial Sequence
  Description of Artificial Sequence:  Enzymatic Nucleic Acid
tggcggagggctagctacaacgactgtggag

SEQ ID NO: 4645 - DNA, 31 bp, Artificial Sequence
  Description of Artificial Sequence:  Enzymatic Nucleic Acid
actaggtgggctagctacaacgactctggcg

SEQ ID NO: 4646 - DNA, 31 bp, Artificial Sequence
  Description of Artificial Sequence:  Enzymatic Nucleic Acid
acgtttcaggctagctacaacgacaggacta

SEQ ID NO: 4647 - DNA, 31 bp, Artificial Sequence
  Description of Artificial Sequence:  Enzymatic Nucleic Acid
agcagacgggctagctacaacgattcatcag

SEQ ID NO: 4648 - DNA, 31 bp, Artificial Sequence
  Description of Artificial Sequence:  Enzymatic Nucleic Acid
tatgaataggctagctacaacgataggacaa

SEQ ID NO: 4649 - DNA, 31 bp, Artificial Sequence
  Description of Artificial Sequence:  Enzymatic Nucleic Acid
tggtgctgggctagctacaacgatgatatga

SEQ ID NO: 4650 - DNA, 31 bp, Artificial Sequence
  Description of Artificial Sequence:  Enzymatic Nucleic Acid
ccacataaggctagctacaacgattttaaaa

SEQ ID NO: 4651 - DNA, 31 bp, Artificial Sequence
  Description of Artificial Sequence:  Enzymatic Nucleic Acid
ttctcctaggctagctacaacgaccacttcc

SEQ ID NO: 4652 - DNA, 31 bp, Artificial Sequence
  Description of Artificial Sequence:  Enzymatic Nucleic Acid
agctgcagggctagctacaacgatctcctat

SEQ ID NO: 4653 - DNA, 31 bp, Artificial Sequence
  Description of Artificial Sequence:  Enzymatic Nucleic Acid
ctaggctaggctagctacaacgatgacagct

SEQ ID NO: 4654 - DNA, 31 bp, Artificial Sequence
  Description of Artificial Sequence:  Enzymatic Nucleic Acid
gacaaaaaggctagctacaacgatcagccct

SEQ ID NO: 4655 - DNA, 31 bp, Artificial Sequence
  Description of Artificial Sequence:  Enzymatic Nucleic Acid
tttatttaggctagctacaacgactgacaaa

SEQ ID NO: 4656 - DNA, 31 bp, Artificial Sequence
  Description of Artificial Sequence:  Enzymatic Nucleic Acid
ttattttaggctagctacaacgattatctga

SEQ ID NO: 4657 - DNA, 31 bp, Artificial Sequence
  Description of Artificial Sequence:  Enzymatic Nucleic Acid
atgatttaggctagctacaacgatttattta

SEQ ID NO: 4658 - DNA, 31 bp, Artificial Sequence
  Description of Artificial Sequence:  Enzymatic Nucleic Acid
atgaatgaggctagctacaacgattatttta

SEQ ID NO: 4659 - DNA, 31 bp, Artificial Sequence
  Description of Artificial Sequence:  Enzymatic Nucleic Acid
ttttataaggctagctacaacgacaaaaaaa

SEQ ID NO: 4660 - DNA, 31 bp, Artificial Sequence
  Description of Artificial Sequence:  Enzymatic Nucleic Acid
ttagaaaaggctagctacaacgatttataat

SEQ ID NO: 4661 - DNA, 31 bp, Artificial Sequence
  Description of Artificial Sequence:  Enzymatic Nucleic Acid
aaaatacaggctagctacaacgatttagaaa

SEQ ID NO: 4662 - DNA, 31 bp, Artificial Sequence
  Description of Artificial Sequence:  Enzymatic Nucleic Acid
acaggaagggctagctacaacgactaaaata

SEQ ID NO: 4663 - DNA, 31 bp, Artificial Sequence
  Description of Artificial Sequence:  Enzymatic Nucleic Acid
ttagtataggctagctacaacgacgccccct

SEQ ID NO: 4664 - DNA, 31 bp, Artificial Sequence
  Description of Artificial Sequence:  Enzymatic Nucleic Acid
tatatacaggctagctacaacgattagtata

SEQ ID NO: 4665 - DNA, 31 bp, Artificial Sequence
  Description of Artificial Sequence:  Enzymatic Nucleic Acid
ggaatacaggctagctacaacgattagtata

SEQ ID NO: 4666 - DNA, 31 bp, Artificial Sequence
  Description of Artificial Sequence:  Enzymatic Nucleic Acid
aaaatacaggctagctacaacgattagtata

SEQ ID NO: 4667 - DNA, 31 bp, Artificial Sequence
  Description of Artificial Sequence:  Enzymatic Nucleic Acid
ttattttaggctagctacaacgacgccccct

SEQ ID NO: 4668 - DNA, 31 bp, Artificial Sequence
  Description of Artificial Sequence:  Enzymatic Nucleic Acid
gcattttaggctagctacaacgatttatcgc

SEQ ID NO: 4669 - DNA, 31 bp, Artificial Sequence
  Description of Artificial Sequence:  Enzymatic Nucleic Acid
gtttagcaggctagctacaacgatttatttt

SEQ ID NO: 4670 - DNA, 31 bp, Artificial Sequence
  Description of Artificial Sequence:  Enzymatic Nucleic Acid
cccagttgggctagctacaacgattagcatt

SEQ ID NO: 4671 - DNA, 31 bp, Artificial Sequence
  Description of Artificial Sequence:  Enzymatic Nucleic Acid
ttacccagggctagctacaacgatgtttagc

SEQ ID NO: 4672 - RNA, 48 nt, Artificial Sequence
  Description of Artificial Sequence:  Enzymatic Nucleic Acid
aaaauauuggagguuacucccuucaaggacaucguccgggaauuauau

SEQ ID NO: 4673 - RNA, 48 nt, Artificial Sequence
  Description of Artificial Sequence:  Enzymatic Nucleic Acid
caccucuuggagguuacucccuucaaggacaucguccgggaugcuccc

SEQ ID NO: 4674 - RNA, 48 nt, Artificial Sequence
  Description of Artificial Sequence:  Enzymatic Nucleic Acid
cauaaccuggagguuacucccuucaaggacaucguccgggaacaccuc

SEQ ID NO: 4675 - RNA, 48 nt, Artificial Sequence
  Description of Artificial Sequence:  Enzymatic Nucleic Acid
ucugccuuggagguuacucccuucaaggacaucguccgggagcugugc

SEQ ID NO: 4676 - RNA, 48 nt, Artificial Sequence
  Description of Artificial Sequence:  Enzymatic Nucleic Acid
ucaaauugggagguuacucccuucaaggacaucguccgggguacuugu

SEQ ID NO: 4677 - RNA, 48 nt, Artificial Sequence
  Description of Artificial Sequence:  Enzymatic Nucleic Acid
cuuagucuggagguuacucccuucaaggacaucguccgggaaauugcg

SEQ ID NO: 4678 - RNA, 48 nt, Artificial Sequence
  Description of Artificial Sequence:  Enzymatic Nucleic Acid
cuugucuuggagguuacucccuucaaggacaucguccgggaauaggag

SEQ ID NO: 4679 - RNA, 48 nt, Artificial Sequence
  Description of Artificial Sequence:  Enzymatic Nucleic Acid
ugguuuauggagguuacucccuucaaggacaucguccgggacaggucu

SEQ ID NO: 4680 - RNA, 48 nt, Artificial Sequence
  Description of Artificial Sequence:  Enzymatic Nucleic Acid
caacuuauggagguuacucccuucaaggacaucguccgggggaagugg

SEQ ID NO: 4681 - RNA, 48 nt, Artificial Sequence
  Description of Artificial Sequence:  Enzymatic Nucleic Acid
ggaaaaugggagguuacucccuucaaggacaucguccgggggguuacg

SEQ ID NO: 4682 - RNA, 48 nt, Artificial Sequence
  Description of Artificial Sequence:  Enzymatic Nucleic Acid
ugaagaauggagguuacucccuucaaggacaucguccgggaagaugaa

SEQ ID NO: 4683 - RNA, 48 nt, Artificial Sequence
  Description of Artificial Sequence:  Enzymatic Nucleic Acid
gaauuacuggagguuacucccuucaaggacaucguccgggagggcccc

SEQ ID NO: 4684 - RNA, 48 nt, Artificial Sequence
  Description of Artificial Sequence:  Enzymatic Nucleic Acid
uuguuguuggagguuacucccuucaaggacaucguccgggagcugaau

SEQ ID NO: 4685 - RNA, 48 nt, Artificial Sequence
  Description of Artificial Sequence:  Enzymatic Nucleic Acid
aaugccuuggagguuacucccuucaaggacaucguccgggauagccau

SEQ ID NO: 4686 - RNA, 48 nt, Artificial Sequence
  Description of Artificial Sequence:  Enzymatic Nucleic Acid
gucgauugggagguuacucccuucaaggacaucguccgggaacgacaa

SEQ ID NO: 4687 - RNA, 48 nt, Artificial Sequence
  Description of Artificial Sequence:  Enzymatic Nucleic Acid
auugggguggagguuacucccuucaaggacaucguccggggauugcaa

SEQ ID NO: 4688 - RNA, 48 nt, Artificial Sequence
  Description of Artificial Sequence:  Enzymatic Nucleic Acid
ucuucuggggagguuacucccuucaaggacaucguccgggacauuggg

SEQ ID NO: 4689 - RNA, 48 nt, Artificial Sequence
  Description of Artificial Sequence:  Enzymatic Nucleic Acid
gaguguuuggagguuacucccuucaaggacaucguccgggaucuucug

SEQ ID NO: 4690 - RNA, 48 nt, Artificial Sequence
  Description of Artificial Sequence:  Enzymatic Nucleic Acid
gccuggguggagguuacucccuucaaggacaucguccgggaccauguc

SEQ ID NO: 4691 - RNA, 48 nt, Artificial Sequence
  Description of Artificial Sequence:  Enzymatic Nucleic Acid
uguagcuuggagguuacucccuucaaggacaucguccgggaaacagau

SEQ ID NO: 4692 - RNA, 48 nt, Artificial Sequence
  Description of Artificial Sequence:  Enzymatic Nucleic Acid
aauaaaauggagguuacucccuucaaggacaucguccggggcuuuccu

SEQ ID NO: 4693 - RNA, 48 nt, Artificial Sequence
  Description of Artificial Sequence:  Enzymatic Nucleic Acid
caaaauggggagguuacucccuucaaggacaucguccgggaacauuuu

SEQ ID NO: 4694 - RNA, 48 nt, Artificial Sequence
  Description of Artificial Sequence:  Enzymatic Nucleic Acid
ucaggaauggagguuacucccuucaaggacaucguccgggaaaauggc

SEQ ID NO: 4695 - RNA, 48 nt, Artificial Sequence
  Description of Artificial Sequence:  Enzymatic Nucleic Acid
ccauguuuggagguuacucccuucaaggacaucguccgggaggaauca

SEQ ID NO: 4696 - RNA, 48 nt, Artificial Sequence
  Description of Artificial Sequence:  Enzymatic Nucleic Acid
cacauaguggagguuacucccuucaaggacaucguccgggagccuuug

SEQ ID NO: 4697 - RNA, 48 nt, Artificial Sequence
  Description of Artificial Sequence:  Enzymatic Nucleic Acid
uuuggucuggagguuacucccuucaaggacaucguccgggacauaguc

SEQ ID NO: 4698 - RNA, 48 nt, Artificial Sequence
  Description of Artificial Sequence:  Enzymatic Nucleic Acid
guaggucuggagguuacucccuucaaggacaucguccgggaaguuuug

SEQ ID NO: 4699 - RNA, 48 nt, Artificial Sequence
  Description of Artificial Sequence:  Enzymatic Nucleic Acid
aacaucagggagguuacucccuucaaggacaucguccgggauuuuugu

SEQ ID NO: 4700 - RNA, 48 nt, Artificial Sequence
  Description of Artificial Sequence:  Enzymatic Nucleic Acid
cagaacauggagguuacucccuucaaggacaucguccgggagcauuuu

SEQ ID NO: 4701 - RNA, 48 nt, Artificial Sequence
  Description of Artificial Sequence:  Enzymatic Nucleic Acid
agacucagggagguuacucccuucaaggacaucguccgggaaccagaa

SEQ ID NO: 4702 - RNA, 48 nt, Artificial Sequence
  Description of Artificial Sequence:  Enzymatic Nucleic Acid
aguagacuggagguuacucccuucaaggacaucguccgggagcaacca

SEQ ID NO: 4703 - RNA, 48 nt, Artificial Sequence
  Description of Artificial Sequence:  Enzymatic Nucleic Acid
ggguucauggagguuacucccuucaaggacaucguccgggauuaccug

SEQ ID NO: 4704 - RNA, 48 nt, Artificial Sequence
  Description of Artificial Sequence:  Enzymatic Nucleic Acid
guaggguuggagguuacucccuucaaggacaucguccgggaucauuac

SEQ ID NO: 4705 - RNA, 48 nt, Artificial Sequence
  Description of Artificial Sequence:  Enzymatic Nucleic Acid
caucugcuggagguuacucccuucaaggacaucguccgggaguguagg

SEQ ID NO: 4706 - RNA, 48 nt, Artificial Sequence
  Description of Artificial Sequence:  Enzymatic Nucleic Acid
gauccuuuggagguuacucccuucaaggacaucguccgggacccuucu

SEQ ID NO: 4707 - RNA, 48 nt, Artificial Sequence
  Description of Artificial Sequence:  Enzymatic Nucleic Acid
aaugaaauggagguuacucccuucaaggacaucguccgggaggaguga

SEQ ID NO: 4708 - RNA, 48 nt, Artificial Sequence
  Description of Artificial Sequence:  Enzymatic Nucleic Acid
uuuuccugggagguuacucccuucaaggacaucguccgggaaugaaau

SEQ ID NO: 4709 - RNA, 48 nt, Artificial Sequence
  Description of Artificial Sequence:  Enzymatic Nucleic Acid
uccauauuggagguuacucccuucaaggacaucguccgggagcuaacu

SEQ ID NO: 4710 - RNA, 48 nt, Artificial Sequence
  Description of Artificial Sequence:  Enzymatic Nucleic Acid
agcccacuggagguuacucccuucaaggacaucguccgggauggacaa

SEQ ID NO: 4711 - RNA, 48 nt, Artificial Sequence
  Description of Artificial Sequence:  Enzymatic Nucleic Acid
cuccccauggagguuacucccuucaaggacaucguccgggguagauga

SEQ ID NO: 4712 - RNA, 48 nt, Artificial Sequence
  Description of Artificial Sequence:  Enzymatic Nucleic Acid
guacucguggagguuacucccuucaaggacaucguccgggaaauacuc

SEQ ID NO: 4713 - RNA, 48 nt, Artificial Sequence
  Description of Artificial Sequence:  Enzymatic Nucleic Acid
auuguacuggagguuacucccuucaaggacaucguccggggucaaaua

SEQ ID NO: 4714 - RNA, 48 nt, Artificial Sequence
  Description of Artificial Sequence:  Enzymatic Nucleic Acid
uuucucauggagguuacucccuucaaggacaucguccgggauuauugu

SEQ ID NO: 4715 - RNA, 48 nt, Artificial Sequence
  Description of Artificial Sequence:  Enzymatic Nucleic Acid
gaauuucuggagguuacucccuucaaggacaucguccgggaucauuau

SEQ ID NO: 4716 - RNA, 48 nt, Artificial Sequence
  Description of Artificial Sequence:  Enzymatic Nucleic Acid
ugaaugugggagguuacucccuucaaggacaucguccgggaucuuuug

SEQ ID NO: 4717 - RNA, 48 nt, Artificial Sequence
  Description of Artificial Sequence:  Enzymatic Nucleic Acid
uccuuuuuggagguuacucccuucaaggacaucguccgggauagaguc

SEQ ID NO: 4718 - RNA, 48 nt, Artificial Sequence
  Description of Artificial Sequence:  Enzymatic Nucleic Acid
aacaaacuggagguuacucccuucaaggacaucguccgggacauccuu

SEQ ID NO: 4719 - RNA, 48 nt, Artificial Sequence
  Description of Artificial Sequence:  Enzymatic Nucleic Acid
ccgucuggggagguuacucccuucaaggacaucguccggggggauugg

SEQ ID NO: 4720 - RNA, 48 nt, Artificial Sequence
  Description of Artificial Sequence:  Enzymatic Nucleic Acid
auguugugggagguuacucccuucaaggacaucguccgggaaacauua

SEQ ID NO: 4721 - RNA, 48 nt, Artificial Sequence
  Description of Artificial Sequence:  Enzymatic Nucleic Acid
uauagaauggagguuacucccuucaaggacaucguccgggaacauguu

SEQ ID NO: 4722 - RNA, 48 nt, Artificial Sequence
  Description of Artificial Sequence:  Enzymatic Nucleic Acid
acagaauuggagguuacucccuucaaggacaucguccgggaacuauag

SEQ ID NO: 4723 - RNA, 48 nt, Artificial Sequence
  Description of Artificial Sequence:  Enzymatic Nucleic Acid
ggagauugggagguuacucccuucaaggacaucguccgggauuuuuga

SEQ ID NO: 4724 - RNA, 48 nt, Artificial Sequence
  Description of Artificial Sequence:  Enzymatic Nucleic Acid
augugcuuggagguuacucccuucaaggacaucguccgggggagauug

SEQ ID NO: 4725 - RNA, 48 nt, Artificial Sequence
  Description of Artificial Sequence:  Enzymatic Nucleic Acid
ucacggauggagguuacucccuucaaggacaucguccgggacuuccca

SEQ ID NO: 4726 - RNA, 48 nt, Artificial Sequence
  Description of Artificial Sequence:  Enzymatic Nucleic Acid
cucagaauggagguuacucccuucaaggacaucguccgggacggauca

SEQ ID NO: 4727 - RNA, 48 nt, Artificial Sequence
  Description of Artificial Sequence:  Enzymatic Nucleic Acid
aaaguccuggagguuacucccuucaaggacaucguccgggagaaucac

SEQ ID NO: 4728 - RNA, 48 nt, Artificial Sequence
  Description of Artificial Sequence:  Enzymatic Nucleic Acid
uguguuguggagguuacucccuucaaggacaucguccgggauaggagu

SEQ ID NO: 4729 - RNA, 48 nt, Artificial Sequence
  Description of Artificial Sequence:  Enzymatic Nucleic Acid
aucugcagggagguuacucccuucaaggacaucguccgggaaugagaa

SEQ ID NO: 4730 - RNA, 48 nt, Artificial Sequence
  Description of Artificial Sequence:  Enzymatic Nucleic Acid
ccaaucugggagguuacucccuucaaggacaucguccgggagcaauga

SEQ ID NO: 4731 - RNA, 48 nt, Artificial Sequence
  Description of Artificial Sequence:  Enzymatic Nucleic Acid
agauuuguggagguuacucccuucaaggacaucguccgggaaggacua

SEQ ID NO: 4732 - RNA, 48 nt, Artificial Sequence
  Description of Artificial Sequence:  Enzymatic Nucleic Acid
uuaccaguggagguuacucccuucaaggacaucguccggggccaugcu

SEQ ID NO: 4733 - RNA, 48 nt, Artificial Sequence
  Description of Artificial Sequence:  Enzymatic Nucleic Acid
gauugaggggagguuacucccuucaaggacaucguccggggguuacca

SEQ ID NO: 4734 - RNA, 48 nt, Artificial Sequence
  Description of Artificial Sequence:  Enzymatic Nucleic Acid
gauucaguggagguuacucccuucaaggacaucguccggggauugagg

SEQ ID NO: 4735 - RNA, 48 nt, Artificial Sequence
  Description of Artificial Sequence:  Enzymatic Nucleic Acid
gcuugauuggagguuacucccuucaaggacaucguccgggagucgauu

SEQ ID NO: 4736 - RNA, 48 nt, Artificial Sequence
  Description of Artificial Sequence:  Enzymatic Nucleic Acid
gucugcagggagguuacucccuucaaggacaucguccgggaggaaaag

SEQ ID NO: 4737 - RNA, 48 nt, Artificial Sequence
  Description of Artificial Sequence:  Enzymatic Nucleic Acid
acugucugggagguuacucccuucaaggacaucguccgggagcaggaa

SEQ ID NO: 4738 - RNA, 48 nt, Artificial Sequence
  Description of Artificial Sequence:  Enzymatic Nucleic Acid
ccccagcuggagguuacucccuucaaggacaucguccgggaacugucu

SEQ ID NO: 4739 - RNA, 48 nt, Artificial Sequence
  Description of Artificial Sequence:  Enzymatic Nucleic Acid
ucaaauguggagguuacucccuucaaggacaucguccgggaccauccc

SEQ ID NO: 4740 - RNA, 48 nt, Artificial Sequence
  Description of Artificial Sequence:  Enzymatic Nucleic Acid
agcacuguggagguuacucccuucaaggacaucguccgggaaauguca

SEQ ID NO: 4741 - RNA, 48 nt, Artificial Sequence
  Description of Artificial Sequence:  Enzymatic Nucleic Acid
augggcagggagguuacucccuucaaggacaucguccgggacugucaa

SEQ ID NO: 4742 - RNA, 48 nt, Artificial Sequence
  Description of Artificial Sequence:  Enzymatic Nucleic Acid
uacaugggggagguuacucccuucaaggacaucguccgggagcacugu

SEQ ID NO: 4743 - RNA, 48 nt, Artificial Sequence
  Description of Artificial Sequence:  Enzymatic Nucleic Acid
uaugaguuggagguuacucccuucaaggacaucguccgggacuuugua

SEQ ID NO: 4744 - RNA, 48 nt, Artificial Sequence
  Description of Artificial Sequence:  Enzymatic Nucleic Acid
gucccuguggagguuacucccuucaaggacaucguccgggacugccac

SEQ ID NO: 4745 - RNA, 48 nt, Artificial Sequence
  Description of Artificial Sequence:  Enzymatic Nucleic Acid
ucuuuuggggagguuacucccuucaaggacaucguccggggagugugu

SEQ ID NO: 4746 - RNA, 48 nt, Artificial Sequence
  Description of Artificial Sequence:  Enzymatic Nucleic Acid
agcugcugggagguuacucccuucaaggacaucguccgggagguaauc

SEQ ID NO: 4747 - RNA, 48 nt, Artificial Sequence
  Description of Artificial Sequence:  Enzymatic Nucleic Acid
gcccgcugggagguuacucccuucaaggacaucguccgggagauggac

SEQ ID NO: 4748 - RNA, 48 nt, Artificial Sequence
  Description of Artificial Sequence:  Enzymatic Nucleic Acid
augccgauggagguuacucccuucaaggacaucguccggggaagcccg

SEQ ID NO: 4749 - RNA, 48 nt, Artificial Sequence
  Description of Artificial Sequence:  Enzymatic Nucleic Acid
uuccuaauggagguuacucccuucaaggacaucguccgggacaguaaa

SEQ ID NO: 4750 - RNA, 48 nt, Artificial Sequence
  Description of Artificial Sequence:  Enzymatic Nucleic Acid
agauccauggagguuacucccuucaaggacaucguccgggaguuggau

SEQ ID NO: 4751 - RNA, 48 nt, Artificial Sequence
  Description of Artificial Sequence:  Enzymatic Nucleic Acid
cacaauuuggagguuacucccuucaaggacaucguccgggagauccau

SEQ ID NO: 4752 - RNA, 48 nt, Artificial Sequence
  Description of Artificial Sequence:  Enzymatic Nucleic Acid
gucagcagggagguuacucccuucaaggacaucguccgggacaauuuc

SEQ ID NO: 4753 - RNA, 48 nt, Artificial Sequence
  Description of Artificial Sequence:  Enzymatic Nucleic Acid
uccgucagggagguuacucccuucaaggacaucguccgggagcacaau

SEQ ID NO: 4754 - RNA, 48 nt, Artificial Sequence
  Description of Artificial Sequence:  Enzymatic Nucleic Acid
ccauccguggagguuacucccuucaaggacaucguccgggagcagcac

SEQ ID NO: 4755 - RNA, 48 nt, Artificial Sequence
  Description of Artificial Sequence:  Enzymatic Nucleic Acid
cguuaaagggagguuacucccuucaaggacaucguccgggacccacuu

SEQ ID NO: 4756 - RNA, 48 nt, Artificial Sequence
  Description of Artificial Sequence:  Enzymatic Nucleic Acid
uuugaccuggagguuacucccuucaaggacaucguccgggguuaaagc

SEQ ID NO: 4757 - RNA, 48 nt, Artificial Sequence
  Description of Artificial Sequence:  Enzymatic Nucleic Acid
gaugauggggagguuacucccuucaaggacaucguccgggaccacuuu

SEQ ID NO: 4758 - RNA, 48 nt, Artificial Sequence
  Description of Artificial Sequence:  Enzymatic Nucleic Acid
ccccaaagggagguuacucccuucaaggacaucguccggggacugugu

SEQ ID NO: 4759 - RNA, 48 nt, Artificial Sequence
  Description of Artificial Sequence:  Enzymatic Nucleic Acid
uugagcugggagguuacucccuucaaggacaucguccgggagagggcc

SEQ ID NO: 4760 - RNA, 48 nt, Artificial Sequence
  Description of Artificial Sequence:  Enzymatic Nucleic Acid
ccuccuguggagguuacucccuucaaggacaucguccgggauuuugga

SEQ ID NO: 4761 - RNA, 48 nt, Artificial Sequence
  Description of Artificial Sequence:  Enzymatic Nucleic Acid
aucugaagggagguuacucccuucaaggacaucguccgggauaugucu

SEQ ID NO: 4762 - RNA, 48 nt, Artificial Sequence
  Description of Artificial Sequence:  Enzymatic Nucleic Acid
aaaagcauggagguuacucccuucaaggacaucguccgggaaugaggc

SEQ ID NO: 4763 - RNA, 48 nt, Artificial Sequence
  Description of Artificial Sequence:  Enzymatic Nucleic Acid
cccaaaagggagguuacucccuucaaggacaucguccgggaucaauga

SEQ ID NO: 4764 - RNA, 48 nt, Artificial Sequence
  Description of Artificial Sequence:  Enzymatic Nucleic Acid
ggauggagggagguuacucccuucaaggacaucguccggggcugagag

SEQ ID NO: 4765 - RNA, 48 nt, Artificial Sequence
  Description of Artificial Sequence:  Enzymatic Nucleic Acid
cuuacucuggagguuacucccuucaaggacaucguccgggaagcugga

SEQ ID NO: 4766 - RNA, 48 nt, Artificial Sequence
  Description of Artificial Sequence:  Enzymatic Nucleic Acid
gugccauuggagguuacucccuucaaggacaucguccgggauccacug

SEQ ID NO: 4767 - RNA, 48 nt, Artificial Sequence
  Description of Artificial Sequence:  Enzymatic Nucleic Acid
uccacgauggagguuacucccuucaaggacaucguccgggacugugcc

SEQ ID NO: 4768 - RNA, 48 nt, Artificial Sequence
  Description of Artificial Sequence:  Enzymatic Nucleic Acid
ggaggcugggagguuacucccuucaaggacaucguccgggguugucca

SEQ ID NO: 4769 - RNA, 48 nt, Artificial Sequence
  Description of Artificial Sequence:  Enzymatic Nucleic Acid
aaccuuagggagguuacucccuucaaggacaucguccgggaaugccug

SEQ ID NO: 4770 - RNA, 48 nt, Artificial Sequence
  Description of Artificial Sequence:  Enzymatic Nucleic Acid
cuugcuugggagguuacucccuucaaggacaucguccgggagacugua

SEQ ID NO: 4771 - RNA, 48 nt, Artificial Sequence
  Description of Artificial Sequence:  Enzymatic Nucleic Acid
gucaggguggagguuacucccuucaaggacaucguccgggaagguuug

SEQ ID NO: 4772 - RNA, 48 nt, Artificial Sequence
  Description of Artificial Sequence:  Enzymatic Nucleic Acid
gugacaguggagguuacucccuucaaggacaucguccgggagggucaa

SEQ ID NO: 4773 - RNA, 48 nt, Artificial Sequence
  Description of Artificial Sequence:  Enzymatic Nucleic Acid
auuggacgggagguuacucccuucaaggacaucguccgggacgggacg

SEQ ID NO: 4774 - RNA, 48 nt, Artificial Sequence
  Description of Artificial Sequence:  Enzymatic Nucleic Acid
caggguagggagguuacucccuucaaggacaucguccgggauuggacg

SEQ ID NO: 4775 - RNA, 48 nt, Artificial Sequence
  Description of Artificial Sequence:  Enzymatic Nucleic Acid
auuggaggggagguuacucccuucaaggacaucguccgggaggguagc

SEQ ID NO: 4776 - RNA, 48 nt, Artificial Sequence
  Description of Artificial Sequence:  Enzymatic Nucleic Acid
uuggaaguggagguuacucccuucaaggacaucguccgggacuguaau

SEQ ID NO: 4777 - RNA, 48 nt, Artificial Sequence
  Description of Artificial Sequence:  Enzymatic Nucleic Acid
uccuuguuggagguuacucccuucaaggacaucguccgggguuuugga

SEQ ID NO: 4778 - RNA, 48 nt, Artificial Sequence
  Description of Artificial Sequence:  Enzymatic Nucleic Acid
aauauuugggagguuacucccuucaaggacaucguccgggauaaacua

SEQ ID NO: 4779 - RNA, 48 nt, Artificial Sequence
  Description of Artificial Sequence:  Enzymatic Nucleic Acid
cuccuuggggagguuacucccuucaaggacaucguccggggaauauuu

SEQ ID NO: 4780 - RNA, 48 nt, Artificial Sequence
  Description of Artificial Sequence:  Enzymatic Nucleic Acid
gauucaauggagguuacucccuucaaggacaucguccgggagggcugu

SEQ ID NO: 4781 - RNA, 48 nt, Artificial Sequence
  Description of Artificial Sequence:  Enzymatic Nucleic Acid
cacugauuggagguuacucccuucaaggacaucguccgggaaucaggg

SEQ ID NO: 4782 - RNA, 48 nt, Artificial Sequence
  Description of Artificial Sequence:  Enzymatic Nucleic Acid
uuuccauuggagguuacucccuucaaggacaucguccgggacugauuc

SEQ ID NO: 4783 - RNA, 48 nt, Artificial Sequence
  Description of Artificial Sequence:  Enzymatic Nucleic Acid
agcaucagggagguuacucccuucaaggacaucguccgggaccugcuc

SEQ ID NO: 4784 - RNA, 48 nt, Artificial Sequence
  Description of Artificial Sequence:  Enzymatic Nucleic Acid
aguagcauggagguuacucccuucaaggacaucguccgggagcaccug

SEQ ID NO: 4785 - RNA, 48 nt, Artificial Sequence
  Description of Artificial Sequence:  Enzymatic Nucleic Acid
cuuaguagggagguuacucccuucaaggacaucguccgggaucagcac

SEQ ID NO: 4786 - RNA, 48 nt, Artificial Sequence
  Description of Artificial Sequence:  Enzymatic Nucleic Acid
gacaccguggagguuacucccuucaaggacaucguccgggauccuuag

SEQ ID NO: 4787 - RNA, 48 nt, Artificial Sequence
  Description of Artificial Sequence:  Enzymatic Nucleic Acid
auucguguggagguuacucccuucaaggacaucguccgggauaaguug

SEQ ID NO: 4788 - RNA, 48 nt, Artificial Sequence
  Description of Artificial Sequence:  Enzymatic Nucleic Acid
cuaccauuggagguuacucccuucaaggacaucguccggggugucaua

SEQ ID NO: 4789 - RNA, 48 nt, Artificial Sequence
  Description of Artificial Sequence:  Enzymatic Nucleic Acid
agagcccgggagguuacucccuucaaggacaucguccgggacuuuuac

SEQ ID NO: 4790 - RNA, 48 nt, Artificial Sequence
  Description of Artificial Sequence:  Enzymatic Nucleic Acid
ucuggcugggagguuacucccuucaaggacaucguccgggguuaacuc

SEQ ID NO: 4791 - RNA, 48 nt, Artificial Sequence
  Description of Artificial Sequence:  Enzymatic Nucleic Acid
ugggguauggagguuacucccuucaaggacaucguccgggacucuccg

SEQ ID NO: 4792 - RNA, 48 nt, Artificial Sequence
  Description of Artificial Sequence:  Enzymatic Nucleic Acid
aucauucuggagguuacucccuucaaggacaucguccgggaauccagc

SEQ ID NO: 4793 - RNA, 48 nt, Artificial Sequence
  Description of Artificial Sequence:  Enzymatic Nucleic Acid
uauuucauggagguuacucccuucaaggacaucguccgggauucucaa

SEQ ID NO: 4794 - RNA, 48 nt, Artificial Sequence
  Description of Artificial Sequence:  Enzymatic Nucleic Acid
uuguauuuggagguuacucccuucaaggacaucguccgggaucauucu

SEQ ID NO: 4795 - RNA, 48 nt, Artificial Sequence
  Description of Artificial Sequence:  Enzymatic Nucleic Acid
auuaauuuggagguuacucccuucaaggacaucguccgggaggucuug

SEQ ID NO: 4796 - RNA, 48 nt, Artificial Sequence
  Description of Artificial Sequence:  Enzymatic Nucleic Acid
uugaacauggagguuacucccuucaaggacaucguccgggauccuuau

SEQ ID NO: 4797 - RNA, 48 nt, Artificial Sequence
  Description of Artificial Sequence:  Enzymatic Nucleic Acid
ugggacauggagguuacucccuucaaggacaucguccgggagaagcca

SEQ ID NO: 4798 - RNA, 48 nt, Artificial Sequence
  Description of Artificial Sequence:  Enzymatic Nucleic Acid
uaugggagggagguuacucccuucaaggacaucguccgggauuuggga

SEQ ID NO: 4799 - RNA, 48 nt, Artificial Sequence
  Description of Artificial Sequence:  Enzymatic Nucleic Acid
gaagagauggagguuacucccuucaaggacaucguccgggagguaugg

SEQ ID NO: 4800 - RNA, 48 nt, Artificial Sequence
  Description of Artificial Sequence:  Enzymatic Nucleic Acid
cuucagguggagguuacucccuucaaggacaucguccgggggugauuu

SEQ ID NO: 4801 - RNA, 48 nt, Artificial Sequence
  Description of Artificial Sequence:  Enzymatic Nucleic Acid
uccgccuuggagguuacucccuucaaggacaucguccgggaggucggu

SEQ ID NO: 4802 - RNA, 48 nt, Artificial Sequence
  Description of Artificial Sequence:  Enzymatic Nucleic Acid
guccaaguggagguuacucccuucaaggacaucguccgggagauuaau

SEQ ID NO: 4803 - RNA, 48 nt, Artificial Sequence
  Description of Artificial Sequence:  Enzymatic Nucleic Acid
gucauaauggagguuacucccuucaaggacaucguccgggauccccag

SEQ ID NO: 4804 - RNA, 48 nt, Artificial Sequence
  Description of Artificial Sequence:  Enzymatic Nucleic Acid
uccaugguggagguuacucccuucaaggacaucguccgggauaaucau

SEQ ID NO: 4805 - RNA, 48 nt, Artificial Sequence
  Description of Artificial Sequence:  Enzymatic Nucleic Acid
uacuuauuggagguuacucccuucaaggacaucguccggggaaugaua

SEQ ID NO: 4806 - RNA, 48 nt, Artificial Sequence
  Description of Artificial Sequence:  Enzymatic Nucleic Acid
ucugagauggagguuacucccuucaaggacaucguccgggaagaauac

SEQ ID NO: 4807 - RNA, 48 nt, Artificial Sequence
  Description of Artificial Sequence:  Enzymatic Nucleic Acid
aagagauuggagguuacucccuucaaggacaucguccgggauugaacu

SEQ ID NO: 4808 - RNA, 48 nt, Artificial Sequence
  Description of Artificial Sequence:  Enzymatic Nucleic Acid
guaguauuggagguuacucccuucaaggacaucguccgggacuugaag

SEQ ID NO: 4809 - RNA, 48 nt, Artificial Sequence
  Description of Artificial Sequence:  Enzymatic Nucleic Acid
gaugagagggagguuacucccuucaaggacaucguccgggaguaguau

SEQ ID NO: 4810 - RNA, 48 nt, Artificial Sequence
  Description of Artificial Sequence:  Enzymatic Nucleic Acid
gacuuccuggagguuacucccuucaaggacaucguccgggagaguugg

SEQ ID NO: 4811 - RNA, 48 nt, Artificial Sequence
  Description of Artificial Sequence:  Enzymatic Nucleic Acid
gccauuuuggagguuacucccuucaaggacaucguccgggaaaaguaa

SEQ ID NO: 4812 - RNA, 48 nt, Artificial Sequence
  Description of Artificial Sequence:  Enzymatic Nucleic Acid
cugaauagggagguuacucccuucaaggacaucguccgggaaugaaaa

SEQ ID NO: 4813 - RNA, 48 nt, Artificial Sequence
  Description of Artificial Sequence:  Enzymatic Nucleic Acid
gaccuuauggagguuacucccuucaaggacaucguccgggaacagccu

SEQ ID NO: 4814 - RNA, 48 nt, Artificial Sequence
  Description of Artificial Sequence:  Enzymatic Nucleic Acid
uuucagauggagguuacucccuucaaggacaucguccggggaccuuau

SEQ ID NO: 4815 - RNA, 48 nt, Artificial Sequence
  Description of Artificial Sequence:  Enzymatic Nucleic Acid
ucugauuuggagguuacucccuucaaggacaucguccgggagaucgac

SEQ ID NO: 4816 - RNA, 48 nt, Artificial Sequence
  Description of Artificial Sequence:  Enzymatic Nucleic Acid
uacucgugggagguuacucccuucaaggacaucguccgggaauguugg

SEQ ID NO: 4817 - RNA, 48 nt, Artificial Sequence
  Description of Artificial Sequence:  Enzymatic Nucleic Acid
aagauacuggagguuacucccuucaaggacaucguccggggugcaaug

SEQ ID NO: 4818 - RNA, 48 nt, Artificial Sequence
  Description of Artificial Sequence:  Enzymatic Nucleic Acid
gucucuggggagguuacucccuucaaggacaucguccgggggagucug

SEQ ID NO: 4819 - RNA, 48 nt, Artificial Sequence
  Description of Artificial Sequence:  Enzymatic Nucleic Acid
cguuucauggagguuacucccuucaaggacaucguccgggaggacuag

SEQ ID NO: 4820 - RNA, 48 nt, Artificial Sequence
  Description of Artificial Sequence:  Enzymatic Nucleic Acid
agacguuuggagguuacucccuucaaggacaucguccgggaucaggac

SEQ ID NO: 4821 - RNA, 48 nt, Artificial Sequence
  Description of Artificial Sequence:  Enzymatic Nucleic Acid
acaaggagggagguuacucccuucaaggacaucguccgggagacguuu

SEQ ID NO: 4822 - RNA, 48 nt, Artificial Sequence
  Description of Artificial Sequence:  Enzymatic Nucleic Acid
gacagcugggagguuacucccuucaaggacaucguccgggaguucucc

SEQ ID NO: 4823 - RNA, 48 nt, Artificial Sequence
  Description of Artificial Sequence:  Enzymatic Nucleic Acid
caaaaauuggagguuacucccuucaaggacaucguccgggagcccuag

SEQ ID NO: 4824 - RNA, 48 nt, Artificial Sequence
  Description of Artificial Sequence:  Enzymatic Nucleic Acid
uuuauaauggagguuacucccuucaaggacaucguccgggaaaaaaag

SEQ ID NO: 4825 - RNA, 48 nt, Artificial Sequence
  Description of Artificial Sequence:  Enzymatic Nucleic Acid
uaguauauggagguuacucccuucaaggacaucguccggggcccccua

SEQ ID NO: 4826 - RNA, 48 nt, Artificial Sequence
  Description of Artificial Sequence:  Enzymatic Nucleic Acid
uauuuuauggagguuacucccuucaaggacaucguccggggcccccua

SEQ ID NO: 4827 - RNA, 48 nt, Artificial Sequence
  Description of Artificial Sequence:  Enzymatic Nucleic Acid
uuguuuagggagguuacucccuucaaggacaucguccgggauuuuauu

SEQ ID NO: 4828 - RNA, 48 nt, Artificial Sequence
  Description of Artificial Sequence:  Enzymatic Nucleic Acid
auauuccaggagguuacucccuucaaggacaucguccgggauccauuu

SEQ ID NO: 4829 - RNA, 48 nt, Artificial Sequence
  Description of Artificial Sequence:  Enzymatic Nucleic Acid
cccuuaaaggagguuacucccuucaaggacaucguccgggaagaaaau

SEQ ID NO: 4830 - RNA, 48 nt, Artificial Sequence
  Description of Artificial Sequence:  Enzymatic Nucleic Acid
aaccucaaggagguuacucccuucaaggacaucguccgggaccucuuc

SEQ ID NO: 4831 - RNA, 48 nt, Artificial Sequence
  Description of Artificial Sequence:  Enzymatic Nucleic Acid
augcuugaggagguuacucccuucaaggacaucguccgggauaaccuc

SEQ ID NO: 4832 - RNA, 48 nt, Artificial Sequence
  Description of Artificial Sequence:  Enzymatic Nucleic Acid
aaugauaaggagguuacucccuucaaggacaucguccgggaauaucuu

SEQ ID NO: 4833 - RNA, 48 nt, Artificial Sequence
  Description of Artificial Sequence:  Enzymatic Nucleic Acid
guuuaucaggagguuacucccuucaaggacaucguccgggaggucuuu

SEQ ID NO: 4834 - RNA, 48 nt, Artificial Sequence
  Description of Artificial Sequence:  Enzymatic Nucleic Acid
uauagacaggagguuacucccuucaaggacaucguccgggacguuucc

SEQ ID NO: 4835 - RNA, 48 nt, Artificial Sequence
  Description of Artificial Sequence:  Enzymatic Nucleic Acid
aauauagaggagguuacucccuucaaggacaucguccgggacacguuu

SEQ ID NO: 4836 - RNA, 48 nt, Artificial Sequence
  Description of Artificial Sequence:  Enzymatic Nucleic Acid
uauauauaggagguuacucccuucaaggacaucguccgggagauauga

SEQ ID NO: 4837 - RNA, 48 nt, Artificial Sequence
  Description of Artificial Sequence:  Enzymatic Nucleic Acid
uugcuguaggagguuacucccuucaaggacaucguccgggaucucccu

SEQ ID NO: 4838 - RNA, 48 nt, Artificial Sequence
  Description of Artificial Sequence:  Enzymatic Nucleic Acid
gaugaacaggagguuacucccuucaaggacaucguccgggagaacucu

SEQ ID NO: 4839 - RNA, 48 nt, Artificial Sequence
  Description of Artificial Sequence:  Enzymatic Nucleic Acid
aagaugaaggagguuacucccuucaaggacaucguccgggacagaacu

SEQ ID NO: 4840 - RNA, 48 nt, Artificial Sequence
  Description of Artificial Sequence:  Enzymatic Nucleic Acid
ugcaacgaggagguuacucccuucaaggacaucguccgggaaugccuu

SEQ ID NO: 4841 - RNA, 48 nt, Artificial Sequence
  Description of Artificial Sequence:  Enzymatic Nucleic Acid
uucuggcaggagguuacucccuucaaggacaucguccgggauuggggu

SEQ ID NO: 4842 - RNA, 48 nt, Artificial Sequence
  Description of Artificial Sequence:  Enzymatic Nucleic Acid
aacagauaggagguuacucccuucaaggacaucguccgggagagaugc

SEQ ID NO: 4843 - RNA, 48 nt, Artificial Sequence
  Description of Artificial Sequence:  Enzymatic Nucleic Acid
gcuucaaaggagguuacucccuucaaggacaucguccgggagauacag

SEQ ID NO: 4844 - RNA, 48 nt, Artificial Sequence
  Description of Artificial Sequence:  Enzymatic Nucleic Acid
aauggcaaggagguuacucccuucaaggacaucguccgggauuuuuga

SEQ ID NO: 4845 - RNA, 48 nt, Artificial Sequence
  Description of Artificial Sequence:  Enzymatic Nucleic Acid
uggucucaggagguuacucccuucaaggacaucguccgggauagucag

SEQ ID NO: 4846 - RNA, 48 nt, Artificial Sequence
  Description of Artificial Sequence:  Enzymatic Nucleic Acid
aaccagaaggagguuacucccuucaaggacaucguccgggaucagcau

SEQ ID NO: 4847 - RNA, 48 nt, Artificial Sequence
  Description of Artificial Sequence:  Enzymatic Nucleic Acid
ucucuccaggagguuacucccuucaaggacaucguccgggaguugccc

SEQ ID NO: 4848 - RNA, 48 nt, Artificial Sequence
  Description of Artificial Sequence:  Enzymatic Nucleic Acid
cucauggaggagguuacucccuucaaggacaucguccgggaaaugccu

SEQ ID NO: 4849 - RNA, 48 nt, Artificial Sequence
  Description of Artificial Sequence:  Enzymatic Nucleic Acid
cugcugaaggagguuacucccuucaaggacaucguccgggaucuuacu

SEQ ID NO: 4850 - RNA, 48 nt, Artificial Sequence
  Description of Artificial Sequence:  Enzymatic Nucleic Acid
cuuuacuaggagguuacucccuucaaggacaucguccgggauuuguac

SEQ ID NO: 4851 - RNA, 48 nt, Artificial Sequence
  Description of Artificial Sequence:  Enzymatic Nucleic Acid
cucccugaggagguuacucccuucaaggacaucguccgggacuucuuu

SEQ ID NO: 4852 - RNA, 48 nt, Artificial Sequence
  Description of Artificial Sequence:  Enzymatic Nucleic Acid
ugguguaaggagguuacucccuucaaggacaucguccgggagcugccu

SEQ ID NO: 4853 - RNA, 48 nt, Artificial Sequence
  Description of Artificial Sequence:  Enzymatic Nucleic Acid
caaacucaggagguuacucccuucaaggacaucguccgggauccuuuu

SEQ ID NO: 4854 - RNA, 48 nt, Artificial Sequence
  Description of Artificial Sequence:  Enzymatic Nucleic Acid
uuggagaaggagguuacucccuucaaggacaucguccgggaaacucac

SEQ ID NO: 4855 - RNA, 48 nt, Artificial Sequence
  Description of Artificial Sequence:  Enzymatic Nucleic Acid
ugugcaaaggagguuacucccuucaaggacaucguccgggauuauaga

SEQ ID NO: 4856 - RNA, 48 nt, Artificial Sequence
  Description of Artificial Sequence:  Enzymatic Nucleic Acid
agaaucaaggagguuacucccuucaaggacaucguccgggauguugug

SEQ ID NO: 4857 - RNA, 48 nt, Artificial Sequence
  Description of Artificial Sequence:  Enzymatic Nucleic Acid
guucuguaggagguuacucccuucaaggacaucguccgggagaauuca

SEQ ID NO: 4858 - RNA, 48 nt, Artificial Sequence
  Description of Artificial Sequence:  Enzymatic Nucleic Acid
uaaacacaggagguuacucccuucaaggacaucguccgggaauucuuu

SEQ ID NO: 4859 - RNA, 48 nt, Artificial Sequence
  Description of Artificial Sequence:  Enzymatic Nucleic Acid
acuaaacaggagguuacucccuucaaggacaucguccgggacaauucu

SEQ ID NO: 4860 - RNA, 48 nt, Artificial Sequence
  Description of Artificial Sequence:  Enzymatic Nucleic Acid
ggacuaaaggagguuacucccuucaaggacaucguccgggacacaauu

SEQ ID NO: 4861 - RNA, 48 nt, Artificial Sequence
  Description of Artificial Sequence:  Enzymatic Nucleic Acid
acuuuguaggagguuacucccuucaaggacaucguccgggaugggcag

SEQ ID NO: 4862 - RNA, 48 nt, Artificial Sequence
  Description of Artificial Sequence:  Enzymatic Nucleic Acid
ccuaaucaggagguuacucccuucaaggacaucguccgggaguaaaug

SEQ ID NO: 4863 - RNA, 48 nt, Artificial Sequence
  Description of Artificial Sequence:  Enzymatic Nucleic Acid
cagcagcaggagguuacucccuucaaggacaucguccgggaauuucag

SEQ ID NO: 4864 - RNA, 48 nt, Artificial Sequence
  Description of Artificial Sequence:  Enzymatic Nucleic Acid
auuuuggaggagguuacucccuucaaggacaucguccgggagcuccuc

SEQ ID NO: 4865 - RNA, 48 nt, Artificial Sequence
  Description of Artificial Sequence:  Enzymatic Nucleic Acid
cugagagaggagguuacucccuucaaggacaucguccgggagcuccau

SEQ ID NO: 4866 - RNA, 48 nt, Artificial Sequence
  Description of Artificial Sequence:  Enzymatic Nucleic Acid
auaagaaaggagguuacucccuucaaggacaucguccgggaaaguguc

SEQ ID NO: 4867 - RNA, 48 nt, Artificial Sequence
  Description of Artificial Sequence:  Enzymatic Nucleic Acid
guccacuaggagguuacucccuucaaggacaucguccgggaaagccac

SEQ ID NO: 4868 - RNA, 48 nt, Artificial Sequence
  Description of Artificial Sequence:  Enzymatic Nucleic Acid
ggacgugaggagguuacucccuucaaggacaucguccgggagucaggg

SEQ ID NO: 4869 - RNA, 48 nt, Artificial Sequence
  Description of Artificial Sequence:  Enzymatic Nucleic Acid
ggcugugaggagguuacucccuucaaggacaucguccgggacuggccc

SEQ ID NO: 4870 - RNA, 48 nt, Artificial Sequence
  Description of Artificial Sequence:  Enzymatic Nucleic Acid
ugaguagaggagguuacucccuucaaggacaucguccgggaccgucau

SEQ ID NO: 4871 - RNA, 48 nt, Artificial Sequence
  Description of Artificial Sequence:  Enzymatic Nucleic Acid
cacuuuuaggagguuacucccuucaaggacaucguccgggacuguauc

SEQ ID NO: 4872 - RNA, 48 nt, Artificial Sequence
  Description of Artificial Sequence:  Enzymatic Nucleic Acid
gguauguaggagguuacucccuucaaggacaucguccgggagugcucc

SEQ ID NO: 4873 - RNA, 48 nt, Artificial Sequence
  Description of Artificial Sequence:  Enzymatic Nucleic Acid
guguugaaggagguuacucccuucaaggacaucguccgggaucauccu

SEQ ID NO: 4874 - RNA, 48 nt, Artificial Sequence
  Description of Artificial Sequence:  Enzymatic Nucleic Acid
cugaaacaggagguuacucccuucaaggacaucguccgggacuugcuu

SEQ ID NO: 4875 - RNA, 48 nt, Artificial Sequence
  Description of Artificial Sequence:  Enzymatic Nucleic Acid
ugcugaaaggagguuacucccuucaaggacaucguccgggacacuugc

SEQ ID NO: 4876 - RNA, 48 nt, Artificial Sequence
  Description of Artificial Sequence:  Enzymatic Nucleic Acid
agaagccaggagguuacucccuucaaggacaucguccgggaaaugagc

SEQ ID NO: 4877 - RNA, 48 nt, Artificial Sequence
  Description of Artificial Sequence:  Enzymatic Nucleic Acid
auuugggaggagguuacucccuucaaggacaucguccgggaucagaag

SEQ ID NO: 4878 - RNA, 48 nt, Artificial Sequence
  Description of Artificial Sequence:  Enzymatic Nucleic Acid
gguuuaaaggagguuacucccuucaaggacaucguccgggaaaaagac

SEQ ID NO: 4879 - RNA, 48 nt, Artificial Sequence
  Description of Artificial Sequence:  Enzymatic Nucleic Acid
cuuaucaaggagguuacucccuucaaggacaucguccgggagccugaa

SEQ ID NO: 4880 - RNA, 48 nt, Artificial Sequence
  Description of Artificial Sequence:  Enzymatic Nucleic Acid
ggaauaaaggagguuacucccuucaaggacaucguccgggaaagauac

SEQ ID NO: 4881 - RNA, 48 nt, Artificial Sequence
  Description of Artificial Sequence:  Enzymatic Nucleic Acid
uauuaggaggagguuacucccuucaaggacaucguccgggaaggagca

SEQ ID NO: 4882 - RNA, 48 nt, Artificial Sequence
  Description of Artificial Sequence:  Enzymatic Nucleic Acid
cacuuccaggagguuacucccuucaaggacaucguccgggauaauuuu

SEQ ID NO: 4883 - RNA, 48 nt, Artificial Sequence
  Description of Artificial Sequence:  Enzymatic Nucleic Acid
gcuauugaggagguuacucccuucaaggacaucguccgggagcugcag

SEQ ID NO: 4884 - RNA, 48 nt, Artificial Sequence
  Description of Artificial Sequence:  Enzymatic Nucleic Acid
uuaucugaggagguuacucccuucaaggacaucguccgggaaaaauuc

SEQ ID NO: 4885 - RNA, 48 nt, Artificial Sequence
  Description of Artificial Sequence:  Enzymatic Nucleic Acid
cuaaaauaggagguuacucccuucaaggacaucguccgggauuuuaga

SEQ ID NO: 4886 - RNA, 48 nt, Artificial Sequence
  Description of Artificial Sequence:  Enzymatic Nucleic Acid
gcccccuaggagguuacucccuucaaggacaucguccgggaggaaguc

SEQ ID NO: 4887 - RNA, 48 nt, Artificial Sequence
  Description of Artificial Sequence:  Enzymatic Nucleic Acid
acuauauaggagguuacucccuucaaggacaucguccgggauuuagua

SEQ ID NO: 4888 - RNA, 48 nt, Artificial Sequence
  Description of Artificial Sequence:  Enzymatic Nucleic Acid
caggaauaggagguuacucccuucaaggacaucguccgggauuuagua

SEQ ID NO: 4889 - RNA, 48 nt, Artificial Sequence
  Description of Artificial Sequence:  Enzymatic Nucleic Acid
gcccccuaggagguuacucccuucaaggacaucguccgggaggaauac

SEQ ID NO: 4890 - RNA, 48 nt, Artificial Sequence
  Description of Artificial Sequence:  Enzymatic Nucleic Acid
cuaaaauaggagguuacucccuucaaggacaucguccgggauuuagua

SEQ ID NO: 4891 - RNA, 48 nt, Artificial Sequence
  Description of Artificial Sequence:  Enzymatic Nucleic Acid
cauuuguaggagguuacucccuucaaggacaucguccgggcaaaagca

SEQ ID NO: 4892 - RNA, 48 nt, Artificial Sequence
  Description of Artificial Sequence:  Enzymatic Nucleic Acid
ucuucaugggagguuacucccuucaaggacaucguccggguccccuua

SEQ ID NO: 4893 - RNA, 48 nt, Artificial Sequence
  Description of Artificial Sequence:  Enzymatic Nucleic Acid
ccucaacaggagguuacucccuucaaggacaucguccgggcucuucau

SEQ ID NO: 4894 - RNA, 48 nt, Artificial Sequence
  Description of Artificial Sequence:  Enzymatic Nucleic Acid
ugacauaaggagguuacucccuucaaggacaucguccgggcucaacac

SEQ ID NO: 4895 - RNA, 48 nt, Artificial Sequence
  Description of Artificial Sequence:  Enzymatic Nucleic Acid
gccagaugggagguuacucccuucaaggacaucguccggguugacaua

SEQ ID NO: 4896 - RNA, 48 nt, Artificial Sequence
  Description of Artificial Sequence:  Enzymatic Nucleic Acid
cagcugugggagguuacucccuucaaggacaucguccgggcagaugcu

SEQ ID NO: 4897 - RNA, 48 nt, Artificial Sequence
  Description of Artificial Sequence:  Enzymatic Nucleic Acid
gccuucagggagguuacucccuucaaggacaucguccgggugugccag

SEQ ID NO: 4898 - RNA, 48 nt, Artificial Sequence
  Description of Artificial Sequence:  Enzymatic Nucleic Acid
uccaucugggagguuacucccuucaaggacaucguccgggcuucagcu

SEQ ID NO: 4899 - RNA, 48 nt, Artificial Sequence
  Description of Artificial Sequence:  Enzymatic Nucleic Acid
auugcguaggagguuacucccuucaaggacaucguccggguuguaaau

SEQ ID NO: 4900 - RNA, 48 nt, Artificial Sequence
  Description of Artificial Sequence:  Enzymatic Nucleic Acid
uacuauugggagguuacucccuucaaggacaucguccgggucuugucu

SEQ ID NO: 4901 - RNA, 48 nt, Artificial Sequence
  Description of Artificial Sequence:  Enzymatic Nucleic Acid
guguuuuaggagguuacucccuucaaggacaucguccggguauugcuc

SEQ ID NO: 4902 - RNA, 48 nt, Artificial Sequence
  Description of Artificial Sequence:  Enzymatic Nucleic Acid
cccccugaggagguuacucccuucaaggacaucguccgggcugaugug

SEQ ID NO: 4903 - RNA, 48 nt, Artificial Sequence
  Description of Artificial Sequence:  Enzymatic Nucleic Acid
gucuuuaaggagguuacucccuucaaggacaucguccgggccccugac

SEQ ID NO: 4904 - RNA, 48 nt, Artificial Sequence
  Description of Artificial Sequence:  Enzymatic Nucleic Acid
guuuccaaggagguuacucccuucaaggacaucguccggguuaucgga

SEQ ID NO: 4905 - RNA, 48 nt, Artificial Sequence
  Description of Artificial Sequence:  Enzymatic Nucleic Acid
uagacacaggagguuacucccuucaaggacaucguccgggguuuccaa

SEQ ID NO: 4906 - RNA, 48 nt, Artificial Sequence
  Description of Artificial Sequence:  Enzymatic Nucleic Acid
uuucuuuaggagguuacucccuucaaggacaucguccgggcauuauau

SEQ ID NO: 4907 - RNA, 48 nt, Artificial Sequence
  Description of Artificial Sequence:  Enzymatic Nucleic Acid
gcggguuaggagguuacucccuucaaggacaucguccggggaaggugu

SEQ ID NO: 4908 - RNA, 48 nt, Artificial Sequence
  Description of Artificial Sequence:  Enzymatic Nucleic Acid
ccccauugggagguuacucccuucaaggacaucguccggguguacauc

SEQ ID NO: 4909 - RNA, 48 nt, Artificial Sequence
  Description of Artificial Sequence:  Enzymatic Nucleic Acid
uuaaauggggagguuacucccuucaaggacaucguccgggcccauugc

SEQ ID NO: 4910 - RNA, 48 nt, Artificial Sequence
  Description of Artificial Sequence:  Enzymatic Nucleic Acid
acacagaaggagguuacucccuucaaggacaucguccgggucuuaaau

SEQ ID NO: 4911 - RNA, 48 nt, Artificial Sequence
  Description of Artificial Sequence:  Enzymatic Nucleic Acid
acucagggggagguuacucccuucaaggacaucguccgggcccuucua

SEQ ID NO: 4912 - RNA, 48 nt, Artificial Sequence
  Description of Artificial Sequence:  Enzymatic Nucleic Acid
gugaauuaggagguuacucccuucaaggacaucguccgggucagggcc

SEQ ID NO: 4913 - RNA, 48 nt, Artificial Sequence
  Description of Artificial Sequence:  Enzymatic Nucleic Acid
uuguucagggagguuacucccuucaaggacaucguccgggugaaugag

SEQ ID NO: 4914 - RNA, 48 nt, Artificial Sequence
  Description of Artificial Sequence:  Enzymatic Nucleic Acid
cuucauagggagguuacucccuucaaggacaucguccgggcauuguug

SEQ ID NO: 4915 - RNA, 48 nt, Artificial Sequence
  Description of Artificial Sequence:  Enzymatic Nucleic Acid
cgacaaugggagguuacucccuucaaggacaucguccgggcuucauag

SEQ ID NO: 4916 - RNA, 48 nt, Artificial Sequence
  Description of Artificial Sequence:  Enzymatic Nucleic Acid
gauugcaaggagguuacucccuucaaggacaucguccggggacaaugc

SEQ ID NO: 4917 - RNA, 48 nt, Artificial Sequence
  Description of Artificial Sequence:  Enzymatic Nucleic Acid
cugggucaggagguuacucccuucaaggacaucguccgggcauguccu

SEQ ID NO: 4918 - RNA, 48 nt, Artificial Sequence
  Description of Artificial Sequence:  Enzymatic Nucleic Acid
cagagaugggagguuacucccuucaaggacaucguccgggcuggguca

SEQ ID NO: 4919 - RNA, 48 nt, Artificial Sequence
  Description of Artificial Sequence:  Enzymatic Nucleic Acid
uccuguagggagguuacucccuucaaggacaucguccggguucaaaca

SEQ ID NO: 4920 - RNA, 48 nt, Artificial Sequence
  Description of Artificial Sequence:  Enzymatic Nucleic Acid
uaaaaucgggagguuacucccuucaaggacaucguccggguuuccugu

SEQ ID NO: 4921 - RNA, 48 nt, Artificial Sequence
  Description of Artificial Sequence:  Enzymatic Nucleic Acid
auagucagggagguuacucccuucaaggacaucguccgggcuuugucu

SEQ ID NO: 4922 - RNA, 48 nt, Artificial Sequence
  Description of Artificial Sequence:  Enzymatic Nucleic Acid
cucagcaaggagguuacucccuucaaggacaucguccgggcagaacau

SEQ ID NO: 4923 - RNA, 48 nt, Artificial Sequence
  Description of Artificial Sequence:  Enzymatic Nucleic Acid
ggaguagaggagguuacucccuucaaggacaucguccgggucagcaac

SEQ ID NO: 4924 - RNA, 48 nt, Artificial Sequence
  Description of Artificial Sequence:  Enzymatic Nucleic Acid
caucauuaggagguuacucccuucaaggacaucguccgggcuggagga

SEQ ID NO: 4925 - RNA, 48 nt, Artificial Sequence
  Description of Artificial Sequence:  Enzymatic Nucleic Acid
cccaucugggagguuacucccuucaaggacaucguccgggucagugua

SEQ ID NO: 4926 - RNA, 48 nt, Artificial Sequence
  Description of Artificial Sequence:  Enzymatic Nucleic Acid
cacaguugggagguuacucccuucaaggacaucguccgggccaucugc

SEQ ID NO: 4927 - RNA, 48 nt, Artificial Sequence
  Description of Artificial Sequence:  Enzymatic Nucleic Acid
uccuuucaggagguuacucccuucaaggacaucguccgggccuucucu

SEQ ID NO: 4928 - RNA, 48 nt, Artificial Sequence
  Description of Artificial Sequence:  Enzymatic Nucleic Acid
ucagcuaaggagguuacucccuucaaggacaucguccggguuuuuucc

SEQ ID NO: 4929 - RNA, 48 nt, Artificial Sequence
  Description of Artificial Sequence:  Enzymatic Nucleic Acid
auauucagggagguuacucccuucaaggacaucguccggguaacuuuu

SEQ ID NO: 4930 - RNA, 48 nt, Artificial Sequence
  Description of Artificial Sequence:  Enzymatic Nucleic Acid
augccuuaggagguuacucccuucaaggacaucguccgggcuuguggu

SEQ ID NO: 4931 - RNA, 48 nt, Artificial Sequence
  Description of Artificial Sequence:  Enzymatic Nucleic Acid
gacaaaugggagguuacucccuucaaggacaucguccgggcuuaccuu

SEQ ID NO: 4932 - RNA, 48 nt, Artificial Sequence
  Description of Artificial Sequence:  Enzymatic Nucleic Acid
ugagcccaggagguuacucccuucaaggacaucguccgggucauggac

SEQ ID NO: 4933 - RNA, 48 nt, Artificial Sequence
  Description of Artificial Sequence:  Enzymatic Nucleic Acid
uagaugagggagguuacucccuucaaggacaucguccgggccacucau

SEQ ID NO: 4934 - RNA, 48 nt, Artificial Sequence
  Description of Artificial Sequence:  Enzymatic Nucleic Acid
gucaaauaggagguuacucccuucaaggacaucguccggguccccauc

SEQ ID NO: 4935 - RNA, 48 nt, Artificial Sequence
  Description of Artificial Sequence:  Enzymatic Nucleic Acid
uuauuguaggagguuacucccuucaaggacaucguccgggucgucaaa

SEQ ID NO: 4936 - RNA, 48 nt, Artificial Sequence
  Description of Artificial Sequence:  Enzymatic Nucleic Acid
ucuuacugggagguuacucccuucaaggacaucguccggguuguauuc

SEQ ID NO: 4937 - RNA, 48 nt, Artificial Sequence
  Description of Artificial Sequence:  Enzymatic Nucleic Acid
acaucuuaggagguuacucccuucaaggacaucguccgggugcuugua

SEQ ID NO: 4938 - RNA, 48 nt, Artificial Sequence
  Description of Artificial Sequence:  Enzymatic Nucleic Acid
aauaccugggagguuacucccuucaaggacaucguccgggugaacauc

SEQ ID NO: 4939 - RNA, 48 nt, Artificial Sequence
  Description of Artificial Sequence:  Enzymatic Nucleic Acid
caguaauaggagguuacucccuucaaggacaucguccgggcugcugaa

SEQ ID NO: 4940 - RNA, 48 nt, Artificial Sequence
  Description of Artificial Sequence:  Enzymatic Nucleic Acid
cauuuguaggagguuacucccuucaaggacaucguccgggcaguaaua

SEQ ID NO: 4941 - RNA, 48 nt, Artificial Sequence
  Description of Artificial Sequence:  Enzymatic Nucleic Acid
cuucuuuaggagguuacucccuucaaggacaucguccggguacauuug

SEQ ID NO: 4942 - RNA, 48 nt, Artificial Sequence
  Description of Artificial Sequence:  Enzymatic Nucleic Acid
cccugacaggagguuacucccuucaaggacaucguccggguucuuuac

SEQ ID NO: 4943 - RNA, 48 nt, Artificial Sequence
  Description of Artificial Sequence:  Enzymatic Nucleic Acid
aacagcugggagguuacucccuucaaggacaucguccgggcucccuga

SEQ ID NO: 4944 - RNA, 48 nt, Artificial Sequence
  Description of Artificial Sequence:  Enzymatic Nucleic Acid
uguaacagggagguuacucccuucaaggacaucguccgggugccuccc

SEQ ID NO: 4945 - RNA, 48 nt, Artificial Sequence
  Description of Artificial Sequence:  Enzymatic Nucleic Acid
uccuguaaggagguuacucccuucaaggacaucguccggguuuauuga

SEQ ID NO: 4946 - RNA, 48 nt, Artificial Sequence
  Description of Artificial Sequence:  Enzymatic Nucleic Acid
agaacaaaggagguuacucccuucaaggacaucguccgggucacaucc

SEQ ID NO: 4947 - RNA, 48 nt, Artificial Sequence
  Description of Artificial Sequence:  Enzymatic Nucleic Acid
uauagaagggagguuacucccuucaaggacaucguccgggcuucuccg

SEQ ID NO: 4948 - RNA, 48 nt, Artificial Sequence
  Description of Artificial Sequence:  Enzymatic Nucleic Acid
gaauucaaggagguuacucccuucaaggacaucguccggguauagaau

SEQ ID NO: 4949 - RNA, 48 nt, Artificial Sequence
  Description of Artificial Sequence:  Enzymatic Nucleic Acid
guuuggagggagguuacucccuucaaggacaucguccggguucuuugu

SEQ ID NO: 4950 - RNA, 48 nt, Artificial Sequence
  Description of Artificial Sequence:  Enzymatic Nucleic Acid
ugauuuugggagguuacucccuucaaggacaucguccggguuguuugg

SEQ ID NO: 4951 - RNA, 48 nt, Artificial Sequence
  Description of Artificial Sequence:  Enzymatic Nucleic Acid
cccaugugggagguuacucccuucaaggacaucguccggguucggaga

SEQ ID NO: 4952 - RNA, 48 nt, Artificial Sequence
  Description of Artificial Sequence:  Enzymatic Nucleic Acid
acggaucaggagguuacucccuucaaggacaucguccggguucccaug

SEQ ID NO: 4953 - RNA, 48 nt, Artificial Sequence
  Description of Artificial Sequence:  Enzymatic Nucleic Acid
cagaaucaggagguuacucccuucaaggacaucguccgggggaucacu

SEQ ID NO: 4954 - RNA, 48 nt, Artificial Sequence
  Description of Artificial Sequence:  Enzymatic Nucleic Acid
uuugguggggagguuacucccuucaaggacaucguccggguguguugu

SEQ ID NO: 4955 - RNA, 48 nt, Artificial Sequence
  Description of Artificial Sequence:  Enzymatic Nucleic Acid
gucaaggaggagguuacucccuucaaggacaucguccggguaaacaca

SEQ ID NO: 4956 - RNA, 48 nt, Artificial Sequence
  Description of Artificial Sequence:  Enzymatic Nucleic Acid
ucgccaugggagguuacucccuucaaggacaucguccggguuccagau

SEQ ID NO: 4957 - RNA, 48 nt, Artificial Sequence
  Description of Artificial Sequence:  Enzymatic Nucleic Acid
accagucgggagguuacucccuucaaggacaucguccgggcaugcuuc

SEQ ID NO: 4958 - RNA, 48 nt, Artificial Sequence
  Description of Artificial Sequence:  Enzymatic Nucleic Acid
ggcgguuaggagguuacucccuucaaggacaucguccgggcagucgcc

SEQ ID NO: 4959 - RNA, 48 nt, Artificial Sequence
  Description of Artificial Sequence:  Enzymatic Nucleic Acid
cuggccugggagguuacucccuucaaggacaucguccggguugauuca

SEQ ID NO: 4960 - RNA, 48 nt, Artificial Sequence
  Description of Artificial Sequence:  Enzymatic Nucleic Acid
aaagcuggggagguuacucccuucaaggacaucguccgggcugcuuga

SEQ ID NO: 4961 - RNA, 48 nt, Artificial Sequence
  Description of Artificial Sequence:  Enzymatic Nucleic Acid
aggaaaagggagguuacucccuucaaggacaucguccggguggccugc

SEQ ID NO: 4962 - RNA, 48 nt, Artificial Sequence
  Description of Artificial Sequence:  Enzymatic Nucleic Acid
cagcucaaggagguuacucccuucaaggacaucguccgggugucugca

SEQ ID NO: 4963 - RNA, 48 nt, Artificial Sequence
  Description of Artificial Sequence:  Enzymatic Nucleic Acid
gaccccagggagguuacucccuucaaggacaucguccgggucaacugu

SEQ ID NO: 4964 - RNA, 48 nt, Artificial Sequence
  Description of Artificial Sequence:  Enzymatic Nucleic Acid
acccaggaggagguuacucccuucaaggacaucguccgggcccagcuc

SEQ ID NO: 4965 - RNA, 48 nt, Artificial Sequence
  Description of Artificial Sequence:  Enzymatic Nucleic Acid
caucccaaggagguuacucccuucaaggacaucguccgggccaggacc

SEQ ID NO: 4966 - RNA, 48 nt, Artificial Sequence
  Description of Artificial Sequence:  Enzymatic Nucleic Acid
aaaugucaggagguuacucccuucaaggacaucguccgggcaucccaa

SEQ ID NO: 4967 - RNA, 48 nt, Artificial Sequence
  Description of Artificial Sequence:  Enzymatic Nucleic Acid
gggcagcaggagguuacucccuucaaggacaucguccgggugucaaau

SEQ ID NO: 4968 - RNA, 48 nt, Artificial Sequence
  Description of Artificial Sequence:  Enzymatic Nucleic Acid
ugaguucaggagguuacucccuucaaggacaucguccggguuuguaca

SEQ ID NO: 4969 - RNA, 48 nt, Artificial Sequence
  Description of Artificial Sequence:  Enzymatic Nucleic Acid
cacugccaggagguuacucccuucaaggacaucguccggguguuuauc

SEQ ID NO: 4970 - RNA, 48 nt, Artificial Sequence
  Description of Artificial Sequence:  Enzymatic Nucleic Acid
ugucacugggagguuacucccuucaaggacaucguccgggcacuguuu

SEQ ID NO: 4971 - RNA, 48 nt, Artificial Sequence
  Description of Artificial Sequence:  Enzymatic Nucleic Acid
cccugucaggagguuacucccuucaaggacaucguccgggugccacug

SEQ ID NO: 4972 - RNA, 48 nt, Artificial Sequence
  Description of Artificial Sequence:  Enzymatic Nucleic Acid
ugaagcugggagguuacucccuucaaggacaucguccgggugcaggua

SEQ ID NO: 4973 - RNA, 48 nt, Artificial Sequence
  Description of Artificial Sequence:  Enzymatic Nucleic Acid
uccugaagggagguuacucccuucaaggacaucguccgggugcugcag

SEQ ID NO: 4974 - RNA, 48 nt, Artificial Sequence
  Description of Artificial Sequence:  Enzymatic Nucleic Acid
cagauggaggagguuacucccuucaaggacaucguccggggucccucc

SEQ ID NO: 4975 - RNA, 48 nt, Artificial Sequence
  Description of Artificial Sequence:  Enzymatic Nucleic Acid
gaagcccgggagguuacucccuucaaggacaucguccgggugcagaug

SEQ ID NO: 4976 - RNA, 48 nt, Artificial Sequence
  Description of Artificial Sequence:  Enzymatic Nucleic Acid
gaucgaagggagguuacucccuucaaggacaucguccgggccgcugca

SEQ ID NO: 4977 - RNA, 48 nt, Artificial Sequence
  Description of Artificial Sequence:  Enzymatic Nucleic Acid
aguaaaugggagguuacucccuucaaggacaucguccgggcgaucgaa

SEQ ID NO: 4978 - RNA, 48 nt, Artificial Sequence
  Description of Artificial Sequence:  Enzymatic Nucleic Acid
agcacccaggagguuacucccuucaaggacaucguccggguuauagug

SEQ ID NO: 4979 - RNA, 48 nt, Artificial Sequence
  Description of Artificial Sequence:  Enzymatic Nucleic Acid
uuaaagcaggagguuacucccuucaaggacaucguccgggccacuuau

SEQ ID NO: 4980 - RNA, 48 nt, Artificial Sequence
  Description of Artificial Sequence:  Enzymatic Nucleic Acid
uuguuugaggagguuacucccuucaaggacaucguccgggcucguuaa

SEQ ID NO: 4981 - RNA, 48 nt, Artificial Sequence
  Description of Artificial Sequence:  Enzymatic Nucleic Acid
uggcaccaggagguuacucccuucaaggacaucguccggguuuguuug

SEQ ID NO: 4982 - RNA, 48 nt, Artificial Sequence
  Description of Artificial Sequence:  Enzymatic Nucleic Acid
ugauggcaggagguuacucccuucaaggacaucguccgggcacuuugu

SEQ ID NO: 4983 - RNA, 48 nt, Artificial Sequence
  Description of Artificial Sequence:  Enzymatic Nucleic Acid
caaagcgaggagguuacucccuucaaggacaucguccgggugugugga

SEQ ID NO: 4984 - RNA, 48 nt, Artificial Sequence
  Description of Artificial Sequence:  Enzymatic Nucleic Acid
gcagagggggagguuacucccuucaaggacaucguccgggcccaaagc

SEQ ID NO: 4985 - RNA, 48 nt, Artificial Sequence
  Description of Artificial Sequence:  Enzymatic Nucleic Acid
uucuugagggagguuacucccuucaaggacaucguccgggugcagagg

SEQ ID NO: 4986 - RNA, 48 nt, Artificial Sequence
  Description of Artificial Sequence:  Enzymatic Nucleic Acid
uuggacagggagguuacucccuucaaggacaucguccggguccucuag

SEQ ID NO: 4987 - RNA, 48 nt, Artificial Sequence
  Description of Artificial Sequence:  Enzymatic Nucleic Acid
ucuguaaaggagguuacucccuucaaggacaucguccgggcuccuguc

SEQ ID NO: 4988 - RNA, 48 nt, Artificial Sequence
  Description of Artificial Sequence:  Enzymatic Nucleic Acid
guucugaaggagguuacucccuucaaggacaucguccggguugaucug

SEQ ID NO: 4989 - RNA, 48 nt, Artificial Sequence
  Description of Artificial Sequence:  Enzymatic Nucleic Acid
caaugaggggagguuacucccuucaaggacaucguccgggcauuguuc

SEQ ID NO: 4990 - RNA, 48 nt, Artificial Sequence
  Description of Artificial Sequence:  Enzymatic Nucleic Acid
ugaaagggggagguuacucccuucaaggacaucguccgggcccaaaag

SEQ ID NO: 4991 - RNA, 48 nt, Artificial Sequence
  Description of Artificial Sequence:  Enzymatic Nucleic Acid
agagacagggagguuacucccuucaaggacaucguccggguccauuuc

SEQ ID NO: 4992 - RNA, 48 nt, Artificial Sequence
  Description of Artificial Sequence:  Enzymatic Nucleic Acid
auggagcgggagguuacucccuucaaggacaucguccgggugagagac

SEQ ID NO: 4993 - RNA, 48 nt, Artificial Sequence
  Description of Artificial Sequence:  Enzymatic Nucleic Acid
cucucaagggagguuacucccuucaaggacaucguccggguggaugga

SEQ ID NO: 4994 - RNA, 48 nt, Artificial Sequence
  Description of Artificial Sequence:  Enzymatic Nucleic Acid
aucccuuaggagguuacucccuucaaggacaucguccgggucucaagc

SEQ ID NO: 4995 - RNA, 48 nt, Artificial Sequence
  Description of Artificial Sequence:  Enzymatic Nucleic Acid
uccacuggggagguuacucccuucaaggacaucguccggguguucugg

SEQ ID NO: 4996 - RNA, 48 nt, Artificial Sequence
  Description of Artificial Sequence:  Enzymatic Nucleic Acid
uucauccaggagguuacucccuucaaggacaucguccggguggcuguu

SEQ ID NO: 4997 - RNA, 48 nt, Artificial Sequence
  Description of Artificial Sequence:  Enzymatic Nucleic Acid
ucacugugggagguuacucccuucaaggacaucguccgggcauucauc

SEQ ID NO: 4998 - RNA, 48 nt, Artificial Sequence
  Description of Artificial Sequence:  Enzymatic Nucleic Acid
cacgaucaggagguuacucccuucaaggacaucguccgggugugccau

SEQ ID NO: 4999 - RNA, 48 nt, Artificial Sequence
  Description of Artificial Sequence:  Enzymatic Nucleic Acid
gcuguccaggagguuacucccuucaaggacaucguccggggaucacug

SEQ ID NO: 5000 - RNA, 48 nt, Artificial Sequence
  Description of Artificial Sequence:  Enzymatic Nucleic Acid
ccacggugggagguuacucccuucaaggacaucguccggguguccacg

SEQ ID NO: 5001 - RNA, 48 nt, Artificial Sequence
  Description of Artificial Sequence:  Enzymatic Nucleic Acid
cuuucccaggagguuacucccuucaaggacaucguccgggggugcugu

SEQ ID NO: 5002 - RNA, 48 nt, Artificial Sequence
  Description of Artificial Sequence:  Enzymatic Nucleic Acid
uggggaggggagguuacucccuucaaggacaucguccgggugcguugu

SEQ ID NO: 5003 - RNA, 48 nt, Artificial Sequence
  Description of Artificial Sequence:  Enzymatic Nucleic Acid
ucuguccaggagguuacucccuucaaggacaucguccgggugggaucc

SEQ ID NO: 5004 - RNA, 48 nt, Artificial Sequence
  Description of Artificial Sequence:  Enzymatic Nucleic Acid
ccaccuugggagguuacucccuucaaggacaucguccggguucugucc

SEQ ID NO: 5005 - RNA, 48 nt, Artificial Sequence
  Description of Artificial Sequence:  Enzymatic Nucleic Acid
caaagccaggagguuacucccuucaaggacaucguccgggcuugcuuc

SEQ ID NO: 5006 - RNA, 48 nt, Artificial Sequence
  Description of Artificial Sequence:  Enzymatic Nucleic Acid
cuacaaagggagguuacucccuucaaggacaucguccgggcaccuugc

SEQ ID NO: 5007 - RNA, 48 nt, Artificial Sequence
  Description of Artificial Sequence:  Enzymatic Nucleic Acid
uuuguccaggagguuacucccuucaaggacaucguccggguacaaagc

SEQ ID NO: 5008 - RNA, 48 nt, Artificial Sequence
  Description of Artificial Sequence:  Enzymatic Nucleic Acid
gagguaggggagguuacucccuucaaggacaucguccgggcauuuugg

SEQ ID NO: 5009 - RNA, 48 nt, Artificial Sequence
  Description of Artificial Sequence:  Enzymatic Nucleic Acid
uagcaaugggagguuacucccuucaaggacaucguccgggcugggauu

SEQ ID NO: 5010 - RNA, 48 nt, Artificial Sequence
  Description of Artificial Sequence:  Enzymatic Nucleic Acid
agugccaaggagguuacucccuucaaggacaucguccgggcuuagcaa

SEQ ID NO: 5011 - RNA, 48 nt, Artificial Sequence
  Description of Artificial Sequence:  Enzymatic Nucleic Acid
uccaagugggagguuacucccuucaaggacaucguccgggcaaccuua

SEQ ID NO: 5012 - RNA, 48 nt, Artificial Sequence
  Description of Artificial Sequence:  Enzymatic Nucleic Acid
cuugcagaggagguuacucccuucaaggacaucguccggguguauuuc

SEQ ID NO: 5013 - RNA, 48 nt, Artificial Sequence
  Description of Artificial Sequence:  Enzymatic Nucleic Acid
ugagcuugggagguuacucccuucaaggacaucguccggguugcagac

SEQ ID NO: 5014 - RNA, 48 nt, Artificial Sequence
  Description of Artificial Sequence:  Enzymatic Nucleic Acid
uuugugagggagguuacucccuucaaggacaucguccggguugcuugc

SEQ ID NO: 5015 - RNA, 48 nt, Artificial Sequence
  Description of Artificial Sequence:  Enzymatic Nucleic Acid
gcacgggaggagguuacucccuucaaggacaucguccggggugacagu

SEQ ID NO: 5016 - RNA, 48 nt, Artificial Sequence
  Description of Artificial Sequence:  Enzymatic Nucleic Acid
uggacgcaggagguuacucccuucaaggacaucguccggggggacgug

SEQ ID NO: 5017 - RNA, 48 nt, Artificial Sequence
  Description of Artificial Sequence:  Enzymatic Nucleic Acid
gcauuggaggagguuacucccuucaaggacaucguccggggcacggga

SEQ ID NO: 5018 - RNA, 48 nt, Artificial Sequence
  Description of Artificial Sequence:  Enzymatic Nucleic Acid
ggaagucaggagguuacucccuucaaggacaucguccggguguaauug

SEQ ID NO: 5019 - RNA, 48 nt, Artificial Sequence
  Description of Artificial Sequence:  Enzymatic Nucleic Acid
ggaauuugggagguuacucccuucaaggacaucguccggguggugucc

SEQ ID NO: 5020 - RNA, 48 nt, Artificial Sequence
  Description of Artificial Sequence:  Enzymatic Nucleic Acid
ccagagggggagguuacucccuucaaggacaucguccggguggggaau

SEQ ID NO: 5021 - RNA, 48 nt, Artificial Sequence
  Description of Artificial Sequence:  Enzymatic Nucleic Acid
auaaacuaggagguuacucccuucaaggacaucguccgggcagagggc

SEQ ID NO: 5022 - RNA, 48 nt, Artificial Sequence
  Description of Artificial Sequence:  Enzymatic Nucleic Acid
ugcauaaaggagguuacucccuucaaggacaucguccggguaccagag

SEQ ID NO: 5023 - RNA, 48 nt, Artificial Sequence
  Description of Artificial Sequence:  Enzymatic Nucleic Acid
uggggaggggagguuacucccuucaaggacaucguccggguccuuggc

SEQ ID NO: 5024 - RNA, 48 nt, Artificial Sequence
  Description of Artificial Sequence:  Enzymatic Nucleic Acid
gacacuggggagguuacucccuucaaggacaucguccgggccugagaa

SEQ ID NO: 5025 - RNA, 48 nt, Artificial Sequence
  Description of Artificial Sequence:  Enzymatic Nucleic Acid
cugugacaggagguuacucccuucaaggacaucguccggguggcccug

SEQ ID NO: 5026 - RNA, 48 nt, Artificial Sequence
  Description of Artificial Sequence:  Enzymatic Nucleic Acid
aaucagggggagguuacucccuucaaggacaucguccgggugugacac

SEQ ID NO: 5027 - RNA, 48 nt, Artificial Sequence
  Description of Artificial Sequence:  Enzymatic Nucleic Acid
uccauucaggagguuacucccuucaaggacaucguccgggugauucaa

SEQ ID NO: 5028 - RNA, 48 nt, Artificial Sequence
  Description of Artificial Sequence:  Enzymatic Nucleic Acid
caagguaaggagguuacucccuucaaggacaucguccggguguuuuuc

SEQ ID NO: 5029 - RNA, 48 nt, Artificial Sequence
  Description of Artificial Sequence:  Enzymatic Nucleic Acid
agcaccugggagguuacucccuucaaggacaucguccggguccauuau

SEQ ID NO: 5030 - RNA, 48 nt, Artificial Sequence
  Description of Artificial Sequence:  Enzymatic Nucleic Acid
caucagcaggagguuacucccuucaaggacaucguccgggcugcucca

SEQ ID NO: 5031 - RNA, 48 nt, Artificial Sequence
  Description of Artificial Sequence:  Enzymatic Nucleic Acid
aguagacaggagguuacucccuucaaggacaucguccgggcgucaucc

SEQ ID NO: 5032 - RNA, 48 nt, Artificial Sequence
  Description of Artificial Sequence:  Enzymatic Nucleic Acid
gugaaauaggagguuacucccuucaaggacaucguccgggcuugagua

SEQ ID NO: 5033 - RNA, 48 nt, Artificial Sequence
  Description of Artificial Sequence:  Enzymatic Nucleic Acid
uguaucuaggagguuacucccuucaaggacaucguccgggcauucgug

SEQ ID NO: 5034 - RNA, 48 nt, Artificial Sequence
  Description of Artificial Sequence:  Enzymatic Nucleic Acid
cuuuuacaggagguuacucccuucaaggacaucguccggguguaucua

SEQ ID NO: 5035 - RNA, 48 nt, Artificial Sequence
  Description of Artificial Sequence:  Enzymatic Nucleic Acid
agcccgcaggagguuacucccuucaaggacaucguccggguuuuacac

SEQ ID NO: 5036 - RNA, 48 nt, Artificial Sequence
  Description of Artificial Sequence:  Enzymatic Nucleic Acid
ucccagagggagguuacucccuucaaggacaucguccgggccgcacuu

SEQ ID NO: 5037 - RNA, 48 nt, Artificial Sequence
  Description of Artificial Sequence:  Enzymatic Nucleic Acid
ugcguuaaggagguuacucccuucaaggacaucguccggguccuccca

SEQ ID NO: 5038 - RNA, 48 nt, Artificial Sequence
  Description of Artificial Sequence:  Enzymatic Nucleic Acid
ccgucuggggagguuacucccuucaaggacaucguccgggugcguuaa

SEQ ID NO: 5039 - RNA, 48 nt, Artificial Sequence
  Description of Artificial Sequence:  Enzymatic Nucleic Acid
ggguaucaggagguuacucccuucaaggacaucguccgggucuccguc

SEQ ID NO: 5040 - RNA, 48 nt, Artificial Sequence
  Description of Artificial Sequence:  Enzymatic Nucleic Acid
ccacucugggagguuacucccuucaaggacaucguccgggugggguau

SEQ ID NO: 5041 - RNA, 48 nt, Artificial Sequence
  Description of Artificial Sequence:  Enzymatic Nucleic Acid
gugcuccaggagguuacucccuucaaggacaucguccgggucugcugg

SEQ ID NO: 5042 - RNA, 48 nt, Artificial Sequence
  Description of Artificial Sequence:  Enzymatic Nucleic Acid
guacagugggagguuacucccuucaaggacaucguccggguccacucu

SEQ ID NO: 5043 - RNA, 48 nt, Artificial Sequence
  Description of Artificial Sequence:  Enzymatic Nucleic Acid
caauccagggagguuacucccuucaaggacaucguccgggcagguaug

SEQ ID NO: 5044 - RNA, 48 nt, Artificial Sequence
  Description of Artificial Sequence:  Enzymatic Nucleic Acid
cacacuugggagguuacucccuucaaggacaucguccggguuguguug

SEQ ID NO: 5045 - RNA, 48 nt, Artificial Sequence
  Description of Artificial Sequence:  Enzymatic Nucleic Acid
gaaacacaggagguuacucccuucaaggacaucguccggguugcuugu

SEQ ID NO: 5046 - RNA, 48 nt, Artificial Sequence
  Description of Artificial Sequence:  Enzymatic Nucleic Acid
auguucugggagguuacucccuucaaggacaucguccgggugaaacac

SEQ ID NO: 5047 - RNA, 48 nt, Artificial Sequence
  Description of Artificial Sequence:  Enzymatic Nucleic Acid
caaaugagggagguuacucccuucaaggacaucguccgggcucccgag

SEQ ID NO: 5048 - RNA, 48 nt, Artificial Sequence
  Description of Artificial Sequence:  Enzymatic Nucleic Acid
aucagaagggagguuacucccuucaaggacaucguccgggcacaaaug

SEQ ID NO: 5049 - RNA, 48 nt, Artificial Sequence
  Description of Artificial Sequence:  Enzymatic Nucleic Acid
ugauuuggggagguuacucccuucaaggacaucguccgggcagguggg

SEQ ID NO: 5050 - RNA, 48 nt, Artificial Sequence
  Description of Artificial Sequence:  Enzymatic Nucleic Acid
aauuuccgggagguuacucccuucaaggacaucguccgggcuucaggu

SEQ ID NO: 5051 - RNA, 48 nt, Artificial Sequence
  Description of Artificial Sequence:  Enzymatic Nucleic Acid
ugagacugggagguuacucccuucaaggacaucguccgggccccguga

SEQ ID NO: 5052 - RNA, 48 nt, Artificial Sequence
  Description of Artificial Sequence:  Enzymatic Nucleic Acid
uaaugagaggagguuacucccuucaaggacaucguccgggugcccccg

SEQ ID NO: 5053 - RNA, 48 nt, Artificial Sequence
  Description of Artificial Sequence:  Enzymatic Nucleic Acid
cccaggagggagguuacucccuucaaggacaucguccggguguccaag

SEQ ID NO: 5054 - RNA, 48 nt, Artificial Sequence
  Description of Artificial Sequence:  Enzymatic Nucleic Acid
cuugugagggagguuacucccuucaaggacaucguccggguguuccau

SEQ ID NO: 5055 - RNA, 48 nt, Artificial Sequence
  Description of Artificial Sequence:  Enzymatic Nucleic Acid
augauauaggagguuacucccuucaaggacaucguccggguugugagc

SEQ ID NO: 5056 - RNA, 48 nt, Artificial Sequence
  Description of Artificial Sequence:  Enzymatic Nucleic Acid
uacuuguaggagguuacucccuucaaggacaucguccggguuauucga

SEQ ID NO: 5057 - RNA, 48 nt, Artificial Sequence
  Description of Artificial Sequence:  Enzymatic Nucleic Acid
caagaauaggagguuacucccuucaaggacaucguccggguuguacuu

SEQ ID NO: 5058 - RNA, 48 nt, Artificial Sequence
  Description of Artificial Sequence:  Enzymatic Nucleic Acid
ucauugaaggagguuacucccuucaaggacaucguccggguugucucu

SEQ ID NO: 5059 - RNA, 48 nt, Artificial Sequence
  Description of Artificial Sequence:  Enzymatic Nucleic Acid
aguauucaggagguuacucccuucaaggacaucguccggguugaagag

SEQ ID NO: 5060 - RNA, 48 nt, Artificial Sequence
  Description of Artificial Sequence:  Enzymatic Nucleic Acid
agaguuggggagguuacucccuucaaggacaucguccggguuccuuug

SEQ ID NO: 5061 - RNA, 48 nt, Artificial Sequence
  Description of Artificial Sequence:  Enzymatic Nucleic Acid
caaaaagaggagguuacucccuucaaggacaucguccggguuccucag

SEQ ID NO: 5062 - RNA, 48 nt, Artificial Sequence
  Description of Artificial Sequence:  Enzymatic Nucleic Acid
gaucugugggagguuacucccuucaaggacaucguccgggcauuuuca

SEQ ID NO: 5063 - RNA, 48 nt, Artificial Sequence
  Description of Artificial Sequence:  Enzymatic Nucleic Acid
aucaacagggagguuacucccuucaaggacaucguccgggcugaauag

SEQ ID NO: 5064 - RNA, 48 nt, Artificial Sequence
  Description of Artificial Sequence:  Enzymatic Nucleic Acid
cagaucgaggagguuacucccuucaaggacaucguccgggcuuaucaa

SEQ ID NO: 5065 - RNA, 48 nt, Artificial Sequence
  Description of Artificial Sequence:  Enzymatic Nucleic Acid
caaagauaggagguuacucccuucaaggacaucguccgggucgugcaa

SEQ ID NO: 5066 - RNA, 48 nt, Artificial Sequence
  Description of Artificial Sequence:  Enzymatic Nucleic Acid
caucaggaggagguuacucccuucaaggacaucguccggguagguguc

SEQ ID NO: 5067 - RNA, 48 nt, Artificial Sequence
  Description of Artificial Sequence:  Enzymatic Nucleic Acid
ggagcagaggagguuacucccuucaaggacaucguccgggguuucauc

SEQ ID NO: 5068 - RNA, 48 nt, Artificial Sequence
  Description of Artificial Sequence:  Enzymatic Nucleic Acid
gaauggugggagguuacucccuucaaggacaucguccggguguugaua

SEQ ID NO: 5069 - RNA, 48 nt, Artificial Sequence
  Description of Artificial Sequence:  Enzymatic Nucleic Acid
ugugaaugggagguuacucccuucaaggacaucguccgggcaggaaug

SEQ ID NO: 5070 - RNA, 48 nt, Artificial Sequence
  Description of Artificial Sequence:  Enzymatic Nucleic Acid
ccuauccaggagguuacucccuucaaggacaucguccggguuccacau

SEQ ID NO: 5071 - RNA, 48 nt, Artificial Sequence
  Description of Artificial Sequence:  Enzymatic Nucleic Acid
auugacagggagguuacucccuucaaggacaucguccgggugcaguuc

SEQ ID NO: 5072 - RNA, 48 nt, Artificial Sequence
  Description of Artificial Sequence:  Enzymatic Nucleic Acid
gcccuaggggagguuacucccuucaaggacaucguccggguauugaca

SEQ ID NO: 5073 - RNA, 48 nt, Artificial Sequence
  Description of Artificial Sequence:  Enzymatic Nucleic Acid
aaauucagggagguuacucccuucaaggacaucguccgggccuaggcu

SEQ ID NO: 5074 - RNA, 48 nt, Artificial Sequence
  Description of Artificial Sequence:  Enzymatic Nucleic Acid
guauaucgggagguuacucccuucaaggacaucguccgggccccuaca

SEQ ID NO: 5075 - RNA, 48 nt, Artificial Sequence
  Description of Artificial Sequence:  Enzymatic Nucleic Acid
uaaauguaggagguuacucccuucaaggacaucguccggguauauaca

SEQ ID NO: 5076 - RNA, 48 nt, Artificial Sequence
  Description of Artificial Sequence:  Enzymatic Nucleic Acid
uuuuaucgggagguuacucccuucaaggacaucguccgggccccuaca

SEQ ID NO: 5077 - RNA, 48 nt, Artificial Sequence
  Description of Artificial Sequence:  Enzymatic Nucleic Acid
auuuguacggagguuacucccuucaaggacaucguccgggaaaagcau

SEQ ID NO: 5078 - RNA, 48 nt, Artificial Sequence
  Description of Artificial Sequence:  Enzymatic Nucleic Acid
uccacaucggagguuacucccuucaaggacaucguccgggauuuguac

SEQ ID NO: 5079 - RNA, 48 nt, Artificial Sequence
  Description of Artificial Sequence:  Enzymatic Nucleic Acid
uuccacauggagguuacucccuucaaggacaucguccgggcauuugua

SEQ ID NO: 5080 - RNA, 48 nt, Artificial Sequence
  Description of Artificial Sequence:  Enzymatic Nucleic Acid
uuauauucggagguuacucccuucaaggacaucguccgggacauccau

SEQ ID NO: 5081 - RNA, 48 nt, Artificial Sequence
  Description of Artificial Sequence:  Enzymatic Nucleic Acid
auuauauuggagguuacucccuucaaggacaucguccgggcacaucca

SEQ ID NO: 5082 - RNA, 48 nt, Artificial Sequence
  Description of Artificial Sequence:  Enzymatic Nucleic Acid
augcucccggagguuacucccuucaaggacaucguccggguuaaacaa

SEQ ID NO: 5083 - RNA, 48 nt, Artificial Sequence
  Description of Artificial Sequence:  Enzymatic Nucleic Acid
caugcuccggagguuacucccuucaaggacaucguccgggcuuaaaca

SEQ ID NO: 5084 - RNA, 48 nt, Artificial Sequence
  Description of Artificial Sequence:  Enzymatic Nucleic Acid
ucaugcucggagguuacucccuucaaggacaucguccgggccuuaaac

SEQ ID NO: 5085 - RNA, 48 nt, Artificial Sequence
  Description of Artificial Sequence:  Enzymatic Nucleic Acid
uucaugcuggagguuacucccuucaaggacaucguccgggcccuuaaa

SEQ ID NO: 5086 - RNA, 48 nt, Artificial Sequence
  Description of Artificial Sequence:  Enzymatic Nucleic Acid
caacaccuggagguuacucccuucaaggacaucguccggguucaugcu

SEQ ID NO: 5087 - RNA, 48 nt, Artificial Sequence
  Description of Artificial Sequence:  Enzymatic Nucleic Acid
cucaacacggagguuacucccuucaaggacaucguccgggucuucaug

SEQ ID NO: 5088 - RNA, 48 nt, Artificial Sequence
  Description of Artificial Sequence:  Enzymatic Nucleic Acid
gacauaacggagguuacucccuucaaggacaucguccgggucaacacc

SEQ ID NO: 5089 - RNA, 48 nt, Artificial Sequence
  Description of Artificial Sequence:  Enzymatic Nucleic Acid
agcugugcggagguuacucccuucaaggacaucguccgggagaugcuu

SEQ ID NO: 5090 - RNA, 48 nt, Artificial Sequence
  Description of Artificial Sequence:  Enzymatic Nucleic Acid
ccaucugcggagguuacucccuucaaggacaucguccggguucagcug

SEQ ID NO: 5091 - RNA, 48 nt, Artificial Sequence
  Description of Artificial Sequence:  Enzymatic Nucleic Acid
auuuccauggagguuacucccuucaaggacaucguccgggugccuuca

SEQ ID NO: 5092 - RNA, 48 nt, Artificial Sequence
  Description of Artificial Sequence:  Enzymatic Nucleic Acid
aauauuucggagguuacucccuucaaggacaucguccgggaucugccu

SEQ ID NO: 5093 - RNA, 48 nt, Artificial Sequence
  Description of Artificial Sequence:  Enzymatic Nucleic Acid
aaauauuuggagguuacucccuucaaggacaucguccgggcaucugcc

SEQ ID NO: 5094 - RNA, 48 nt, Artificial Sequence
  Description of Artificial Sequence:  Enzymatic Nucleic Acid
aucuuaguggagguuacucccuucaaggacaucguccgggucaaauug

SEQ ID NO: 5095 - RNA, 48 nt, Artificial Sequence
  Description of Artificial Sequence:  Enzymatic Nucleic Acid
aacaauauggagguuacucccuucaaggacaucguccggguuagucuc

SEQ ID NO: 5096 - RNA, 48 nt, Artificial Sequence
  Description of Artificial Sequence:  Enzymatic Nucleic Acid
gcucuuguggagguuacucccuucaaggacaucguccggguucaauag

SEQ ID NO: 5097 - RNA, 48 nt, Artificial Sequence
  Description of Artificial Sequence:  Enzymatic Nucleic Acid
cuauugcuggagguuacucccuucaaggacaucguccggguugucuuc

SEQ ID NO: 5098 - RNA, 48 nt, Artificial Sequence
  Description of Artificial Sequence:  Enzymatic Nucleic Acid
ccccugacggagguuacucccuucaaggacaucguccgggugaugugu

SEQ ID NO: 5099 - RNA, 48 nt, Artificial Sequence
  Description of Artificial Sequence:  Enzymatic Nucleic Acid
uuaaccccggagguuacucccuucaaggacaucguccgggugaccuga

SEQ ID NO: 5100 - RNA, 48 nt, Artificial Sequence
  Description of Artificial Sequence:  Enzymatic Nucleic Acid
uuuaacccggagguuacucccuucaaggacaucguccgggcugaccug

SEQ ID NO: 5101 - RNA, 48 nt, Artificial Sequence
  Description of Artificial Sequence:  Enzymatic Nucleic Acid
cuuuaaccggagguuacucccuucaaggacaucguccgggccugaccu

SEQ ID NO: 5102 - RNA, 48 nt, Artificial Sequence
  Description of Artificial Sequence:  Enzymatic Nucleic Acid
ucuuuaacggagguuacucccuucaaggacaucguccgggcccugacc

SEQ ID NO: 5103 - RNA, 48 nt, Artificial Sequence
  Description of Artificial Sequence:  Enzymatic Nucleic Acid
ucacagguggagguuacucccuucaaggacaucguccggguuuaaccc

SEQ ID NO: 5104 - RNA, 48 nt, Artificial Sequence
  Description of Artificial Sequence:  Enzymatic Nucleic Acid
cacguuucggagguuacucccuucaaggacaucguccgggaacuuauc

SEQ ID NO: 5105 - RNA, 48 nt, Artificial Sequence
  Description of Artificial Sequence:  Enzymatic Nucleic Acid
acacguuuggagguuacucccuucaaggacaucguccgggcaacuuau

SEQ ID NO: 5106 - RNA, 48 nt, Artificial Sequence
  Description of Artificial Sequence:  Enzymatic Nucleic Acid
uucuuuacggagguuacucccuucaaggacaucguccgggauuauaua

SEQ ID NO: 5107 - RNA, 48 nt, Artificial Sequence
  Description of Artificial Sequence:  Enzymatic Nucleic Acid
gugucuuuggagguuacucccuucaaggacaucguccggguuuaccau

SEQ ID NO: 5108 - RNA, 48 nt, Artificial Sequence
  Description of Artificial Sequence:  Enzymatic Nucleic Acid
gaagguguggagguuacucccuucaaggacaucguccggguuucuuua

SEQ ID NO: 5109 - RNA, 48 nt, Artificial Sequence
  Description of Artificial Sequence:  Enzymatic Nucleic Acid
auuccucuggagguuacucccuucaaggacaucguccggguuuggaaa

SEQ ID NO: 5110 - RNA, 48 nt, Artificial Sequence
  Description of Artificial Sequence:  Enzymatic Nucleic Acid
ugauuccuggagguuacucccuucaaggacaucguccgggucuuugga

SEQ ID NO: 5111 - RNA, 48 nt, Artificial Sequence
  Description of Artificial Sequence:  Enzymatic Nucleic Acid
ugugauucggagguuacucccuucaaggacaucguccgggucucuuug

SEQ ID NO: 5112 - RNA, 48 nt, Artificial Sequence
  Description of Artificial Sequence:  Enzymatic Nucleic Acid
cugugauuggagguuacucccuucaaggacaucguccgggcucucuuu

SEQ ID NO: 5113 - RNA, 48 nt, Artificial Sequence
  Description of Artificial Sequence:  Enzymatic Nucleic Acid
acaucuccggagguuacucccuucaaggacaucguccgggugugauuc

SEQ ID NO: 5114 - RNA, 48 nt, Artificial Sequence
  Description of Artificial Sequence:  Enzymatic Nucleic Acid
uacaucucggagguuacucccuucaaggacaucguccgggcugugauu

SEQ ID NO: 5115 - RNA, 48 nt, Artificial Sequence
  Description of Artificial Sequence:  Enzymatic Nucleic Acid
guacaucuggagguuacucccuucaaggacaucguccgggccugugau

SEQ ID NO: 5116 - RNA, 48 nt, Artificial Sequence
  Description of Artificial Sequence:  Enzymatic Nucleic Acid
cuguacauggagguuacucccuucaaggacaucguccgggucccugug

SEQ ID NO: 5117 - RNA, 48 nt, Artificial Sequence
  Description of Artificial Sequence:  Enzymatic Nucleic Acid
aauggcccggagguuacucccuucaaggacaucguccgggauugcugu

SEQ ID NO: 5118 - RNA, 48 nt, Artificial Sequence
  Description of Artificial Sequence:  Enzymatic Nucleic Acid
aaauggccggagguuacucccuucaaggacaucguccgggcauugcug

SEQ ID NO: 5119 - RNA, 48 nt, Artificial Sequence
  Description of Artificial Sequence:  Enzymatic Nucleic Acid
uaaauggcggagguuacucccuucaaggacaucguccgggccauugcu

SEQ ID NO: 5120 - RNA, 48 nt, Artificial Sequence
  Description of Artificial Sequence:  Enzymatic Nucleic Acid
acagaacuggagguuacucccuucaaggacaucguccggguuaaaugg

SEQ ID NO: 5121 - RNA, 48 nt, Artificial Sequence
  Description of Artificial Sequence:  Enzymatic Nucleic Acid
ggccccuuggagguuacucccuucaaggacaucguccggguagaaggu

SEQ ID NO: 5122 - RNA, 48 nt, Artificial Sequence
  Description of Artificial Sequence:  Enzymatic Nucleic Acid
cagggcccggagguuacucccuucaaggacaucguccggguucuagaa

SEQ ID NO: 5123 - RNA, 48 nt, Artificial Sequence
  Description of Artificial Sequence:  Enzymatic Nucleic Acid
ucagggccggagguuacucccuucaaggacaucguccgggcuucuaga

SEQ ID NO: 5124 - RNA, 48 nt, Artificial Sequence
  Description of Artificial Sequence:  Enzymatic Nucleic Acid
cucagggcggagguuacucccuucaaggacaucguccgggccuucuag

SEQ ID NO: 5125 - RNA, 48 nt, Artificial Sequence
  Description of Artificial Sequence:  Enzymatic Nucleic Acid
uucauagcggagguuacucccuucaaggacaucguccgggauuguugu

SEQ ID NO: 5126 - RNA, 48 nt, Artificial Sequence
  Description of Artificial Sequence:  Enzymatic Nucleic Acid
gacaaugcggagguuacucccuucaaggacaucguccggguucauagc

SEQ ID NO: 5127 - RNA, 48 nt, Artificial Sequence
  Description of Artificial Sequence:  Enzymatic Nucleic Acid
uucaucuuggagguuacucccuucaaggacaucguccggguggcacau

SEQ ID NO: 5128 - RNA, 48 nt, Artificial Sequence
  Description of Artificial Sequence:  Enzymatic Nucleic Acid
uguuucauggagguuacucccuucaaggacaucguccggguucuggca

SEQ ID NO: 5129 - RNA, 48 nt, Artificial Sequence
  Description of Artificial Sequence:  Enzymatic Nucleic Acid
accaugucggagguuacucccuucaaggacaucguccggguuuauuug

SEQ ID NO: 5130 - RNA, 48 nt, Artificial Sequence
  Description of Artificial Sequence:  Enzymatic Nucleic Acid
caccauguggagguuacucccuucaaggacaucguccgggcuuuauuu

SEQ ID NO: 5131 - RNA, 48 nt, Artificial Sequence
  Description of Artificial Sequence:  Enzymatic Nucleic Acid
ugggucacggagguuacucccuucaaggacaucguccgggauguccuu

SEQ ID NO: 5132 - RNA, 48 nt, Artificial Sequence
  Description of Artificial Sequence:  Enzymatic Nucleic Acid
agagaugcggagguuacucccuucaaggacaucguccgggugggucac

SEQ ID NO: 5133 - RNA, 48 nt, Artificial Sequence
  Description of Artificial Sequence:  Enzymatic Nucleic Acid
ucgcuuucggagguuacucccuucaaggacaucguccggguguagcuu

SEQ ID NO: 5134 - RNA, 48 nt, Artificial Sequence
  Description of Artificial Sequence:  Enzymatic Nucleic Acid
aucgcuuuggagguuacucccuucaaggacaucguccgggcuguagcu

SEQ ID NO: 5135 - RNA, 48 nt, Artificial Sequence
  Description of Artificial Sequence:  Enzymatic Nucleic Acid
uugucuucggagguuacucccuucaaggacaucguccgggauguuuca

SEQ ID NO: 5136 - RNA, 48 nt, Artificial Sequence
  Description of Artificial Sequence:  Enzymatic Nucleic Acid
uuugucuuggagguuacucccuucaaggacaucguccgggcauguuuc

SEQ ID NO: 5137 - RNA, 48 nt, Artificial Sequence
  Description of Artificial Sequence:  Enzymatic Nucleic Acid
gccuuuguggagguuacucccuucaaggacaucguccggguuccaugu

SEQ ID NO: 5138 - RNA, 48 nt, Artificial Sequence
  Description of Artificial Sequence:  Enzymatic Nucleic Acid
uagucagcggagguuacucccuucaaggacaucguccggguuugucuu

SEQ ID NO: 5139 - RNA, 48 nt, Artificial Sequence
  Description of Artificial Sequence:  Enzymatic Nucleic Acid
guuuugguggagguuacucccuucaaggacaucguccgggucacauag

SEQ ID NO: 5140 - RNA, 48 nt, Artificial Sequence
  Description of Artificial Sequence:  Enzymatic Nucleic Acid
uuguagguggagguuacucccuucaaggacaucguccgggucaaguuu

SEQ ID NO: 5141 - RNA, 48 nt, Artificial Sequence
  Description of Artificial Sequence:  Enzymatic Nucleic Acid
ucagcaacggagguuacucccuucaaggacaucguccgggagaacauc

SEQ ID NO: 5142 - RNA, 48 nt, Artificial Sequence
  Description of Artificial Sequence:  Enzymatic Nucleic Acid
aucauuacggagguuacucccuucaaggacaucguccggguggaggag

SEQ ID NO: 5143 - RNA, 48 nt, Artificial Sequence
  Description of Artificial Sequence:  Enzymatic Nucleic Acid
uugcccauggagguuacucccuucaaggacaucguccgggugcucagu

SEQ ID NO: 5144 - RNA, 48 nt, Artificial Sequence
  Description of Artificial Sequence:  Enzymatic Nucleic Acid
caguugccggagguuacucccuucaaggacaucguccgggaucugcuc

SEQ ID NO: 5145 - RNA, 48 nt, Artificial Sequence
  Description of Artificial Sequence:  Enzymatic Nucleic Acid
acaguugcggagguuacucccuucaaggacaucguccgggcaucugcu

SEQ ID NO: 5146 - RNA, 48 nt, Artificial Sequence
  Description of Artificial Sequence:  Enzymatic Nucleic Acid
cuucucucggagguuacucccuucaaggacaucguccgggacaguugc

SEQ ID NO: 5147 - RNA, 48 nt, Artificial Sequence
  Description of Artificial Sequence:  Enzymatic Nucleic Acid
ccuucucuggagguuacucccuucaaggacaucguccgggcacaguug

SEQ ID NO: 5148 - RNA, 48 nt, Artificial Sequence
  Description of Artificial Sequence:  Enzymatic Nucleic Acid
acccuucuggagguuacucccuucaaggacaucguccggguccacagu

SEQ ID NO: 5149 - RNA, 48 nt, Artificial Sequence
  Description of Artificial Sequence:  Enzymatic Nucleic Acid
ucacccuuggagguuacucccuucaaggacaucguccgggucuccaca

SEQ ID NO: 5150 - RNA, 48 nt, Artificial Sequence
  Description of Artificial Sequence:  Enzymatic Nucleic Acid
cuuucaccggagguuacucccuucaaggacaucguccggguucucucc

SEQ ID NO: 5151 - RNA, 48 nt, Artificial Sequence
  Description of Artificial Sequence:  Enzymatic Nucleic Acid
ccuuucacggagguuacucccuucaaggacaucguccgggcuucucuc

SEQ ID NO: 5152 - RNA, 48 nt, Artificial Sequence
  Description of Artificial Sequence:  Enzymatic Nucleic Acid
gguggaucggagguuacucccuucaaggacaucguccggguuucaccc

SEQ ID NO: 5153 - RNA, 48 nt, Artificial Sequence
  Description of Artificial Sequence:  Enzymatic Nucleic Acid
agguggauggagguuacucccuucaaggacaucguccgggcuuucacc

SEQ ID NO: 5154 - RNA, 48 nt, Artificial Sequence
  Description of Artificial Sequence:  Enzymatic Nucleic Acid
cuuuuuucggagguuacucccuucaaggacaucguccgggugcaauga

SEQ ID NO: 5155 - RNA, 48 nt, Artificial Sequence
  Description of Artificial Sequence:  Enzymatic Nucleic Acid
acuuuuuuggagguuacucccuucaaggacaucguccgggcugcaaug

SEQ ID NO: 5156 - RNA, 48 nt, Artificial Sequence
  Description of Artificial Sequence:  Enzymatic Nucleic Acid
uuguggucggagguuacucccuucaaggacaucguccgggauauucag

SEQ ID NO: 5157 - RNA, 48 nt, Artificial Sequence
  Description of Artificial Sequence:  Enzymatic Nucleic Acid
cuugugguggagguuacucccuucaaggacaucguccgggcauauuca

SEQ ID NO: 5158 - RNA, 48 nt, Artificial Sequence
  Description of Artificial Sequence:  Enzymatic Nucleic Acid
ugccuuacggagguuacucccuucaaggacaucguccggguugugguc

SEQ ID NO: 5159 - RNA, 48 nt, Artificial Sequence
  Description of Artificial Sequence:  Enzymatic Nucleic Acid
acaaaugcggagguuacucccuucaaggacaucguccggguuaccuug

SEQ ID NO: 5160 - RNA, 48 nt, Artificial Sequence
  Description of Artificial Sequence:  Enzymatic Nucleic Acid
gaugagccggagguuacucccuucaaggacaucguccgggacucaugg

SEQ ID NO: 5161 - RNA, 48 nt, Artificial Sequence
  Description of Artificial Sequence:  Enzymatic Nucleic Acid
agaugagcggagguuacucccuucaaggacaucguccgggcacucaug

SEQ ID NO: 5162 - RNA, 48 nt, Artificial Sequence
  Description of Artificial Sequence:  Enzymatic Nucleic Acid
auacucccggagguuacucccuucaaggacaucguccgggaucguaga

SEQ ID NO: 5163 - RNA, 48 nt, Artificial Sequence
  Description of Artificial Sequence:  Enzymatic Nucleic Acid
aauacuccggagguuacucccuucaaggacaucguccgggcaucguag

SEQ ID NO: 5164 - RNA, 48 nt, Artificial Sequence
  Description of Artificial Sequence:  Enzymatic Nucleic Acid
aaauacucggagguuacucccuucaaggacaucguccgggccaucgua

SEQ ID NO: 5165 - RNA, 48 nt, Artificial Sequence
  Description of Artificial Sequence:  Enzymatic Nucleic Acid
caaauacuggagguuacucccuucaaggacaucguccgggcccaucgu

SEQ ID NO: 5166 - RNA, 48 nt, Artificial Sequence
  Description of Artificial Sequence:  Enzymatic Nucleic Acid
uagaauuuggagguuacucccuucaaggacaucguccgggucaucauu

SEQ ID NO: 5167 - RNA, 48 nt, Artificial Sequence
  Description of Artificial Sequence:  Enzymatic Nucleic Acid
uauucuucggagguuacucccuucaaggacaucguccgggauuggaua

SEQ ID NO: 5168 - RNA, 48 nt, Artificial Sequence
  Description of Artificial Sequence:  Enzymatic Nucleic Acid
guauucuuggagguuacucccuucaaggacaucguccgggcauuggau

SEQ ID NO: 5169 - RNA, 48 nt, Artificial Sequence
  Description of Artificial Sequence:  Enzymatic Nucleic Acid
cuuguauuggagguuacucccuucaaggacaucguccggguuccauug

SEQ ID NO: 5170 - RNA, 48 nt, Artificial Sequence
  Description of Artificial Sequence:  Enzymatic Nucleic Acid
cugaacauggagguuacucccuucaaggacaucguccggguuacugcu

SEQ ID NO: 5171 - RNA, 48 nt, Artificial Sequence
  Description of Artificial Sequence:  Enzymatic Nucleic Acid
aguaauacggagguuacucccuucaaggacaucguccgggugcugaac

SEQ ID NO: 5172 - RNA, 48 nt, Artificial Sequence
  Description of Artificial Sequence:  Enzymatic Nucleic Acid
auuuguacggagguuacucccuucaaggacaucguccgggaguaauac

SEQ ID NO: 5173 - RNA, 48 nt, Artificial Sequence
  Description of Artificial Sequence:  Enzymatic Nucleic Acid
ugacacuuggagguuacucccuucaaggacaucguccggguuuacuac

SEQ ID NO: 5174 - RNA, 48 nt, Artificial Sequence
  Description of Artificial Sequence:  Enzymatic Nucleic Acid
cugccuccggagguuacucccuucaaggacaucguccgggugacacuu

SEQ ID NO: 5175 - RNA, 48 nt, Artificial Sequence
  Description of Artificial Sequence:  Enzymatic Nucleic Acid
gcugccucggagguuacucccuucaaggacaucguccgggcugacacu

SEQ ID NO: 5176 - RNA, 48 nt, Artificial Sequence
  Description of Artificial Sequence:  Enzymatic Nucleic Acid
agcugccuggagguuacucccuucaaggacaucguccgggccugacac

SEQ ID NO: 5177 - RNA, 48 nt, Artificial Sequence
  Description of Artificial Sequence:  Enzymatic Nucleic Acid
acagcugcggagguuacucccuucaaggacaucguccgggucccugac

SEQ ID NO: 5178 - RNA, 48 nt, Artificial Sequence
  Description of Artificial Sequence:  Enzymatic Nucleic Acid
augugcauggagguuacucccuucaaggacaucguccggguuuuggug

SEQ ID NO: 5179 - RNA, 48 nt, Artificial Sequence
  Description of Artificial Sequence:  Enzymatic Nucleic Acid
auagagucggagguuacucccuucaaggacaucguccggguguaacuu

SEQ ID NO: 5180 - RNA, 48 nt, Artificial Sequence
  Description of Artificial Sequence:  Enzymatic Nucleic Acid
cauagaguggagguuacucccuucaaggacaucguccgggcuguaacu

SEQ ID NO: 5181 - RNA, 48 nt, Artificial Sequence
  Description of Artificial Sequence:  Enzymatic Nucleic Acid
cucacaucggagguuacucccuucaaggacaucguccggguuuuucau

SEQ ID NO: 5182 - RNA, 48 nt, Artificial Sequence
  Description of Artificial Sequence:  Enzymatic Nucleic Acid
acucacauggagguuacucccuucaaggacaucguccgggcuuuuuca

SEQ ID NO: 5183 - RNA, 48 nt, Artificial Sequence
  Description of Artificial Sequence:  Enzymatic Nucleic Acid
uucuccguggagguuacucccuucaaggacaucguccggguggcggga

SEQ ID NO: 5184 - RNA, 48 nt, Artificial Sequence
  Description of Artificial Sequence:  Enzymatic Nucleic Acid
gccuucucggagguuacucccuucaaggacaucguccggggucuggcg

SEQ ID NO: 5185 - RNA, 48 nt, Artificial Sequence
  Description of Artificial Sequence:  Enzymatic Nucleic Acid
agccuucuggagguuacucccuucaaggacaucguccgggcgucuggc

SEQ ID NO: 5186 - RNA, 48 nt, Artificial Sequence
  Description of Artificial Sequence:  Enzymatic Nucleic Acid
gaagccuuggagguuacucccuucaaggacaucguccggguccgucug

SEQ ID NO: 5187 - RNA, 48 nt, Artificial Sequence
  Description of Artificial Sequence:  Enzymatic Nucleic Acid
auagaagcggagguuacucccuucaaggacaucguccggguucuccgu

SEQ ID NO: 5188 - RNA, 48 nt, Artificial Sequence
  Description of Artificial Sequence:  Enzymatic Nucleic Acid
guuuuguuggagguuacucccuucaaggacaucguccggguguacaga

SEQ ID NO: 5189 - RNA, 48 nt, Artificial Sequence
  Description of Artificial Sequence:  Enzymatic Nucleic Acid
uggagcuuggagguuacucccuucaaggacaucguccggguuuguugu

SEQ ID NO: 5190 - RNA, 48 nt, Artificial Sequence
  Description of Artificial Sequence:  Enzymatic Nucleic Acid
ucacuuccggagguuacucccuucaaggacaucguccgggaugugcuu

SEQ ID NO: 5191 - RNA, 48 nt, Artificial Sequence
  Description of Artificial Sequence:  Enzymatic Nucleic Acid
aucacuucggagguuacucccuucaaggacaucguccgggcaugugcu

SEQ ID NO: 5192 - RNA, 48 nt, Artificial Sequence
  Description of Artificial Sequence:  Enzymatic Nucleic Acid
gaucacuuggagguuacucccuucaaggacaucguccgggccaugugc

SEQ ID NO: 5193 - RNA, 48 nt, Artificial Sequence
  Description of Artificial Sequence:  Enzymatic Nucleic Acid
uuaaagucggagguuacucccuucaaggacaucguccgggucagaauc

SEQ ID NO: 5194 - RNA, 48 nt, Artificial Sequence
  Description of Artificial Sequence:  Enzymatic Nucleic Acid
cuuaaaguggagguuacucccuucaaggacaucguccgggcucagaau

SEQ ID NO: 5195 - RNA, 48 nt, Artificial Sequence
  Description of Artificial Sequence:  Enzymatic Nucleic Acid
gugguuuuggagguuacucccuucaaggacaucguccggguuaaaguc

SEQ ID NO: 5196 - RNA, 48 nt, Artificial Sequence
  Description of Artificial Sequence:  Enzymatic Nucleic Acid
uguccaauggagguuacucccuucaaggacaucguccgggugcagcaa

SEQ ID NO: 5197 - RNA, 48 nt, Artificial Sequence
  Description of Artificial Sequence:  Enzymatic Nucleic Acid
ucuuugucggagguuacucccuucaaggacaucguccgggaaucugca

SEQ ID NO: 5198 - RNA, 48 nt, Artificial Sequence
  Description of Artificial Sequence:  Enzymatic Nucleic Acid
uucuuuguggagguuacucccuucaaggacaucguccgggcaaucugc

SEQ ID NO: 5199 - RNA, 48 nt, Artificial Sequence
  Description of Artificial Sequence:  Enzymatic Nucleic Acid
acacaauuggagguuacucccuucaaggacaucguccggguuugucca

SEQ ID NO: 5200 - RNA, 48 nt, Artificial Sequence
  Description of Artificial Sequence:  Enzymatic Nucleic Acid
caugcuucggagguuacucccuucaaggacaucguccgggagauuugu

SEQ ID NO: 5201 - RNA, 48 nt, Artificial Sequence
  Description of Artificial Sequence:  Enzymatic Nucleic Acid
ccaugcuuggagguuacucccuucaaggacaucguccgggcagauuug

SEQ ID NO: 5202 - RNA, 48 nt, Artificial Sequence
  Description of Artificial Sequence:  Enzymatic Nucleic Acid
ccagucgcggagguuacucccuucaaggacaucguccgggaugcuucc

SEQ ID NO: 5203 - RNA, 48 nt, Artificial Sequence
  Description of Artificial Sequence:  Enzymatic Nucleic Acid
gcgguuacggagguuacucccuucaaggacaucguccgggagucgcca

SEQ ID NO: 5204 - RNA, 48 nt, Artificial Sequence
  Description of Artificial Sequence:  Enzymatic Nucleic Acid
aagcuggcggagguuacucccuucaaggacaucguccgggugcuugau

SEQ ID NO: 5205 - RNA, 48 nt, Artificial Sequence
  Description of Artificial Sequence:  Enzymatic Nucleic Acid
ucaacuguggagguuacucccuucaaggacaucguccgggugcagcag

SEQ ID NO: 5206 - RNA, 48 nt, Artificial Sequence
  Description of Artificial Sequence:  Enzymatic Nucleic Acid
caggacccggagguuacucccuucaaggacaucguccgggagcucaac

SEQ ID NO: 5207 - RNA, 48 nt, Artificial Sequence
  Description of Artificial Sequence:  Enzymatic Nucleic Acid
ccaggaccggagguuacucccuucaaggacaucguccgggcagcucaa

SEQ ID NO: 5208 - RNA, 48 nt, Artificial Sequence
  Description of Artificial Sequence:  Enzymatic Nucleic Acid
cccaggacggagguuacucccuucaaggacaucguccgggccagcuca

SEQ ID NO: 5209 - RNA, 48 nt, Artificial Sequence
  Description of Artificial Sequence:  Enzymatic Nucleic Acid
ucccaaccggagguuacucccuucaaggacaucguccgggaggacccc

SEQ ID NO: 5210 - RNA, 48 nt, Artificial Sequence
  Description of Artificial Sequence:  Enzymatic Nucleic Acid
aucccaacggagguuacucccuucaaggacaucguccgggcaggaccc

SEQ ID NO: 5211 - RNA, 48 nt, Artificial Sequence
  Description of Artificial Sequence:  Enzymatic Nucleic Acid
caccauccggagguuacucccuucaaggacaucguccgggaacccagg

SEQ ID NO: 5212 - RNA, 48 nt, Artificial Sequence
  Description of Artificial Sequence:  Enzymatic Nucleic Acid
ucaccaucggagguuacucccuucaaggacaucguccgggcaacccag

SEQ ID NO: 5213 - RNA, 48 nt, Artificial Sequence
  Description of Artificial Sequence:  Enzymatic Nucleic Acid
gucaccauggagguuacucccuucaaggacaucguccgggccaaccca

SEQ ID NO: 5214 - RNA, 48 nt, Artificial Sequence
  Description of Artificial Sequence:  Enzymatic Nucleic Acid
aaugucacggagguuacucccuucaaggacaucguccgggaucccaac

SEQ ID NO: 5215 - RNA, 48 nt, Artificial Sequence
  Description of Artificial Sequence:  Enzymatic Nucleic Acid
cuguuuauggagguuacucccuucaaggacaucguccggguguaugag

SEQ ID NO: 5216 - RNA, 48 nt, Artificial Sequence
  Description of Artificial Sequence:  Enzymatic Nucleic Acid
gucacugcggagguuacucccuucaaggacaucguccgggacuguuua

SEQ ID NO: 5217 - RNA, 48 nt, Artificial Sequence
  Description of Artificial Sequence:  Enzymatic Nucleic Acid
guguguccggagguuacucccuucaaggacaucguccgggugucacug

SEQ ID NO: 5218 - RNA, 48 nt, Artificial Sequence
  Description of Artificial Sequence:  Enzymatic Nucleic Acid
agugugucggagguuacucccuucaaggacaucguccgggcugucacu

SEQ ID NO: 5219 - RNA, 48 nt, Artificial Sequence
  Description of Artificial Sequence:  Enzymatic Nucleic Acid
gaguguguggagguuacucccuucaaggacaucguccgggccugucac

SEQ ID NO: 5220 - RNA, 48 nt, Artificial Sequence
  Description of Artificial Sequence:  Enzymatic Nucleic Acid
cagguaauggagguuacucccuucaaggacaucguccggguuuuggcg

SEQ ID NO: 5221 - RNA, 48 nt, Artificial Sequence
  Description of Artificial Sequence:  Enzymatic Nucleic Acid
cgucccucggagguuacucccuucaaggacaucguccgggugaagcug

SEQ ID NO: 5222 - RNA, 48 nt, Artificial Sequence
  Description of Artificial Sequence:  Enzymatic Nucleic Acid
acgucccuggagguuacucccuucaaggacaucguccgggcugaagcu

SEQ ID NO: 5223 - RNA, 48 nt, Artificial Sequence
  Description of Artificial Sequence:  Enzymatic Nucleic Acid
ggacguccggagguuacucccuucaaggacaucguccggguccugaag

SEQ ID NO: 5224 - RNA, 48 nt, Artificial Sequence
  Description of Artificial Sequence:  Enzymatic Nucleic Acid
uggacgucggagguuacucccuucaaggacaucguccgggcuccugaa

SEQ ID NO: 5225 - RNA, 48 nt, Artificial Sequence
  Description of Artificial Sequence:  Enzymatic Nucleic Acid
auggacguggagguuacucccuucaaggacaucguccgggccuccuga

SEQ ID NO: 5226 - RNA, 48 nt, Artificial Sequence
  Description of Artificial Sequence:  Enzymatic Nucleic Acid
ucgaagccggagguuacucccuucaaggacaucguccggggcugcaga

SEQ ID NO: 5227 - RNA, 48 nt, Artificial Sequence
  Description of Artificial Sequence:  Enzymatic Nucleic Acid
aucgaagcggagguuacucccuucaaggacaucguccgggcgcugcag

SEQ ID NO: 5228 - RNA, 48 nt, Artificial Sequence
  Description of Artificial Sequence:  Enzymatic Nucleic Acid
guaaaugcggagguuacucccuucaaggacaucguccggggaucgaag

SEQ ID NO: 5229 - RNA, 48 nt, Artificial Sequence
  Description of Artificial Sequence:  Enzymatic Nucleic Acid
auuucuucggagguuacucccuucaaggacaucguccggguaaucaca

SEQ ID NO: 5230 - RNA, 48 nt, Artificial Sequence
  Description of Artificial Sequence:  Enzymatic Nucleic Acid
uauuucuuggagguuacucccuucaaggacaucguccgggcuaaucac

SEQ ID NO: 5231 - RNA, 48 nt, Artificial Sequence
  Description of Artificial Sequence:  Enzymatic Nucleic Acid
ggauauuuggagguuacucccuucaaggacaucguccggguuccuaau

SEQ ID NO: 5232 - RNA, 48 nt, Artificial Sequence
  Description of Artificial Sequence:  Enzymatic Nucleic Acid
uucagaucggagguuacucccuucaaggacaucguccgggaucaguug

SEQ ID NO: 5233 - RNA, 48 nt, Artificial Sequence
  Description of Artificial Sequence:  Enzymatic Nucleic Acid
uuucagauggagguuacucccuucaaggacaucguccgggcaucaguu

SEQ ID NO: 5234 - RNA, 48 nt, Artificial Sequence
  Description of Artificial Sequence:  Enzymatic Nucleic Acid
uccccaucggagguuacucccuucaaggacaucguccggggucagcag

SEQ ID NO: 5235 - RNA, 48 nt, Artificial Sequence
  Description of Artificial Sequence:  Enzymatic Nucleic Acid
uuccccauggagguuacucccuucaaggacaucguccgggcgucagca

SEQ ID NO: 5236 - RNA, 48 nt, Artificial Sequence
  Description of Artificial Sequence:  Enzymatic Nucleic Acid
gucuucccggagguuacucccuucaaggacaucguccgggauccguca

SEQ ID NO: 5237 - RNA, 48 nt, Artificial Sequence
  Description of Artificial Sequence:  Enzymatic Nucleic Acid
ugucuuccggagguuacucccuucaaggacaucguccgggcauccguc

SEQ ID NO: 5238 - RNA, 48 nt, Artificial Sequence
  Description of Artificial Sequence:  Enzymatic Nucleic Acid
uugucuucggagguuacucccuucaaggacaucguccgggccauccgu

SEQ ID NO: 5239 - RNA, 48 nt, Artificial Sequence
  Description of Artificial Sequence:  Enzymatic Nucleic Acid
guugucuuggagguuacucccuucaaggacaucguccgggcccauccg

SEQ ID NO: 5240 - RNA, 48 nt, Artificial Sequence
  Description of Artificial Sequence:  Enzymatic Nucleic Acid
aguguuguggagguuacucccuucaaggacaucguccggguuccccau

SEQ ID NO: 5241 - RNA, 48 nt, Artificial Sequence
  Description of Artificial Sequence:  Enzymatic Nucleic Acid
aaagcaccggagguuacucccuucaaggacaucguccgggacuuauag

SEQ ID NO: 5242 - RNA, 48 nt, Artificial Sequence
  Description of Artificial Sequence:  Enzymatic Nucleic Acid
uaaagcacggagguuacucccuucaaggacaucguccgggcacuuaua

SEQ ID NO: 5243 - RNA, 48 nt, Artificial Sequence
  Description of Artificial Sequence:  Enzymatic Nucleic Acid
uguuugacggagguuacucccuucaaggacaucguccgggucguuaaa

SEQ ID NO: 5244 - RNA, 48 nt, Artificial Sequence
  Description of Artificial Sequence:  Enzymatic Nucleic Acid
gauggcacggagguuacucccuucaaggacaucguccgggacuuuguu

SEQ ID NO: 5245 - RNA, 48 nt, Artificial Sequence
  Description of Artificial Sequence:  Enzymatic Nucleic Acid
gagggcccggagguuacucccuucaaggacaucguccgggaaagcgac

SEQ ID NO: 5246 - RNA, 48 nt, Artificial Sequence
  Description of Artificial Sequence:  Enzymatic Nucleic Acid
agagggccggagguuacucccuucaaggacaucguccgggcaaagcga

SEQ ID NO: 5247 - RNA, 48 nt, Artificial Sequence
  Description of Artificial Sequence:  Enzymatic Nucleic Acid
cagagggcggagguuacucccuucaaggacaucguccgggccaaagcg

SEQ ID NO: 5248 - RNA, 48 nt, Artificial Sequence
  Description of Artificial Sequence:  Enzymatic Nucleic Acid
cucuaguuggagguuacucccuucaaggacaucguccggguugagcug

SEQ ID NO: 5249 - RNA, 48 nt, Artificial Sequence
  Description of Artificial Sequence:  Enzymatic Nucleic Acid
cagcuccuggagguuacucccuucaaggacaucguccggguaguucuu

SEQ ID NO: 5250 - RNA, 48 nt, Artificial Sequence
  Description of Artificial Sequence:  Enzymatic Nucleic Acid
gacagcucggagguuacucccuucaaggacaucguccgggucuaguuc

SEQ ID NO: 5251 - RNA, 48 nt, Artificial Sequence
  Description of Artificial Sequence:  Enzymatic Nucleic Acid
ggacagcuggagguuacucccuucaaggacaucguccgggcucuaguu

SEQ ID NO: 5252 - RNA, 48 nt, Artificial Sequence
  Description of Artificial Sequence:  Enzymatic Nucleic Acid
uaaaccucggagguuacucccuucaaggacaucguccgggugucauuu

SEQ ID NO: 5253 - RNA, 48 nt, Artificial Sequence
  Description of Artificial Sequence:  Enzymatic Nucleic Acid
guaaaccuggagguuacucccuucaaggacaucguccgggcugucauu

SEQ ID NO: 5254 - RNA, 48 nt, Artificial Sequence
  Description of Artificial Sequence:  Enzymatic Nucleic Acid
cuguaaacggagguuacucccuucaaggacaucguccggguccuguca

SEQ ID NO: 5255 - RNA, 48 nt, Artificial Sequence
  Description of Artificial Sequence:  Enzymatic Nucleic Acid
gcauauguggagguuacucccuucaaggacaucguccggguguaaacc

SEQ ID NO: 5256 - RNA, 48 nt, Artificial Sequence
  Description of Artificial Sequence:  Enzymatic Nucleic Acid
aacuugauggagguuacucccuucaaggacaucguccgggugaagcau

SEQ ID NO: 5257 - RNA, 48 nt, Artificial Sequence
  Description of Artificial Sequence:  Enzymatic Nucleic Acid
ccauuguuggagguuacucccuucaaggacaucguccgggugaacuug

SEQ ID NO: 5258 - RNA, 48 nt, Artificial Sequence
  Description of Artificial Sequence:  Enzymatic Nucleic Acid
aaugaggcggagguuacucccuucaaggacaucguccgggauuguucu

SEQ ID NO: 5259 - RNA, 48 nt, Artificial Sequence
  Description of Artificial Sequence:  Enzymatic Nucleic Acid
aagggcccggagguuacucccuucaaggacaucguccgggaaaagcau

SEQ ID NO: 5260 - RNA, 48 nt, Artificial Sequence
  Description of Artificial Sequence:  Enzymatic Nucleic Acid
aaagggccggagguuacucccuucaaggacaucguccgggcaaaagca

SEQ ID NO: 5261 - RNA, 48 nt, Artificial Sequence
  Description of Artificial Sequence:  Enzymatic Nucleic Acid
gaaagggcggagguuacucccuucaaggacaucguccgggccaaaagc

SEQ ID NO: 5262 - RNA, 48 nt, Artificial Sequence
  Description of Artificial Sequence:  Enzymatic Nucleic Acid
uccauuucggagguuacucccuucaaggacaucguccgggugaugaaa

SEQ ID NO: 5263 - RNA, 48 nt, Artificial Sequence
  Description of Artificial Sequence:  Enzymatic Nucleic Acid
cuccauuuggagguuacucccuucaaggacaucguccgggcugaugaa

SEQ ID NO: 5264 - RNA, 48 nt, Artificial Sequence
  Description of Artificial Sequence:  Enzymatic Nucleic Acid
gacagcucggagguuacucccuucaaggacaucguccgggauuuccug

SEQ ID NO: 5265 - RNA, 48 nt, Artificial Sequence
  Description of Artificial Sequence:  Enzymatic Nucleic Acid
agacagcuggagguuacucccuucaaggacaucguccgggcauuuccu

SEQ ID NO: 5266 - RNA, 48 nt, Artificial Sequence
  Description of Artificial Sequence:  Enzymatic Nucleic Acid
cccuuacuggagguuacucccuucaaggacaucguccgggucaagcug

SEQ ID NO: 5267 - RNA, 48 nt, Artificial Sequence
  Description of Artificial Sequence:  Enzymatic Nucleic Acid
guuaauccggagguuacucccuucaaggacaucguccggguuacucuc

SEQ ID NO: 5268 - RNA, 48 nt, Artificial Sequence
  Description of Artificial Sequence:  Enzymatic Nucleic Acid
gguuaaucggagguuacucccuucaaggacaucguccgggcuuacucu

SEQ ID NO: 5269 - RNA, 48 nt, Artificial Sequence
  Description of Artificial Sequence:  Enzymatic Nucleic Acid
ggguuaauggagguuacucccuucaaggacaucguccgggccuuacuc

SEQ ID NO: 5270 - RNA, 48 nt, Artificial Sequence
  Description of Artificial Sequence:  Enzymatic Nucleic Acid
uggcuguuggagguuacucccuucaaggacaucguccggguggagggu

SEQ ID NO: 5271 - RNA, 48 nt, Artificial Sequence
  Description of Artificial Sequence:  Enzymatic Nucleic Acid
cauucaucggagguuacucccuucaaggacaucguccgggacuggcug

SEQ ID NO: 5272 - RNA, 48 nt, Artificial Sequence
  Description of Artificial Sequence:  Enzymatic Nucleic Acid
ccauucauggagguuacucccuucaaggacaucguccgggcacuggcu

SEQ ID NO: 5273 - RNA, 48 nt, Artificial Sequence
  Description of Artificial Sequence:  Enzymatic Nucleic Acid
cacugugcggagguuacucccuucaaggacaucguccgggauucaucc

SEQ ID NO: 5274 - RNA, 48 nt, Artificial Sequence
  Description of Artificial Sequence:  Enzymatic Nucleic Acid
gugcugucggagguuacucccuucaaggacaucguccgggacgaucac

SEQ ID NO: 5275 - RNA, 48 nt, Artificial Sequence
  Description of Artificial Sequence:  Enzymatic Nucleic Acid
ggugcuguggagguuacucccuucaaggacaucguccgggcacgauca

SEQ ID NO: 5276 - RNA, 48 nt, Artificial Sequence
  Description of Artificial Sequence:  Enzymatic Nucleic Acid
uccuuuccggagguuacucccuucaaggacaucguccgggacggugcu

SEQ ID NO: 5277 - RNA, 48 nt, Artificial Sequence
  Description of Artificial Sequence:  Enzymatic Nucleic Acid
guccuuucggagguuacucccuucaaggacaucguccgggcacggugc

SEQ ID NO: 5278 - RNA, 48 nt, Artificial Sequence
  Description of Artificial Sequence:  Enzymatic Nucleic Acid
uguccuuuggagguuacucccuucaaggacaucguccgggccacggug

SEQ ID NO: 5279 - RNA, 48 nt, Artificial Sequence
  Description of Artificial Sequence:  Enzymatic Nucleic Acid
aaagugucggagguuacucccuucaaggacaucguccggguuucccac

SEQ ID NO: 5280 - RNA, 48 nt, Artificial Sequence
  Description of Artificial Sequence:  Enzymatic Nucleic Acid
caaaguguggagguuacucccuucaaggacaucguccgggcuuuccca

SEQ ID NO: 5281 - RNA, 48 nt, Artificial Sequence
  Description of Artificial Sequence:  Enzymatic Nucleic Acid
gcguugucggagguuacucccuucaaggacaucguccgggaggugaua

SEQ ID NO: 5282 - RNA, 48 nt, Artificial Sequence
  Description of Artificial Sequence:  Enzymatic Nucleic Acid
ugcguuguggagguuacucccuucaaggacaucguccgggcaggugau

SEQ ID NO: 5283 - RNA, 48 nt, Artificial Sequence
  Description of Artificial Sequence:  Enzymatic Nucleic Acid
ugggauccggagguuacucccuucaaggacaucguccgggagagaagg

SEQ ID NO: 5284 - RNA, 48 nt, Artificial Sequence
  Description of Artificial Sequence:  Enzymatic Nucleic Acid
cugggaucggagguuacucccuucaaggacaucguccgggcagagaag

SEQ ID NO: 5285 - RNA, 48 nt, Artificial Sequence
  Description of Artificial Sequence:  Enzymatic Nucleic Acid
acugggauggagguuacucccuucaaggacaucguccgggccagagaa

SEQ ID NO: 5286 - RNA, 48 nt, Artificial Sequence
  Description of Artificial Sequence:  Enzymatic Nucleic Acid
cuucugucggagguuacucccuucaaggacaucguccgggacugggau

SEQ ID NO: 5287 - RNA, 48 nt, Artificial Sequence
  Description of Artificial Sequence:  Enzymatic Nucleic Acid
gcuucuguggagguuacucccuucaaggacaucguccgggcacuggga

SEQ ID NO: 5288 - RNA, 48 nt, Artificial Sequence
  Description of Artificial Sequence:  Enzymatic Nucleic Acid
ccuugcuuggagguuacucccuucaaggacaucguccggguguccacu

SEQ ID NO: 5289 - RNA, 48 nt, Artificial Sequence
  Description of Artificial Sequence:  Enzymatic Nucleic Acid
aaagccacggagguuacucccuucaaggacaucguccggguugcuucu

SEQ ID NO: 5290 - RNA, 48 nt, Artificial Sequence
  Description of Artificial Sequence:  Enzymatic Nucleic Acid
uacaaagcggagguuacucccuucaaggacaucguccgggaccuugcu

SEQ ID NO: 5291 - RNA, 48 nt, Artificial Sequence
  Description of Artificial Sequence:  Enzymatic Nucleic Acid
uuuuugucggagguuacucccuucaaggacaucguccgggacuacaaa

SEQ ID NO: 5292 - RNA, 48 nt, Artificial Sequence
  Description of Artificial Sequence:  Enzymatic Nucleic Acid
guuuuuguggagguuacucccuucaaggacaucguccgggcacuacaa

SEQ ID NO: 5293 - RNA, 48 nt, Artificial Sequence
  Description of Artificial Sequence:  Enzymatic Nucleic Acid
agguaggcggagguuacucccuucaaggacaucguccgggauuuuggu

SEQ ID NO: 5294 - RNA, 48 nt, Artificial Sequence
  Description of Artificial Sequence:  Enzymatic Nucleic Acid
agcaaugcggagguuacucccuucaaggacaucguccgggugggauuu

SEQ ID NO: 5295 - RNA, 48 nt, Artificial Sequence
  Description of Artificial Sequence:  Enzymatic Nucleic Acid
gugccaacggagguuacucccuucaaggacaucguccggguuagcaau

SEQ ID NO: 5296 - RNA, 48 nt, Artificial Sequence
  Description of Artificial Sequence:  Enzymatic Nucleic Acid
ccaagugcggagguuacucccuucaaggacaucguccgggaaccuuag

SEQ ID NO: 5297 - RNA, 48 nt, Artificial Sequence
  Description of Artificial Sequence:  Enzymatic Nucleic Acid
uguauuucggagguuacucccuucaaggacaucguccgggaagugcca

SEQ ID NO: 5298 - RNA, 48 nt, Artificial Sequence
  Description of Artificial Sequence:  Enzymatic Nucleic Acid
cuguauuuggagguuacucccuucaaggacaucguccgggcaagugcc

SEQ ID NO: 5299 - RNA, 48 nt, Artificial Sequence
  Description of Artificial Sequence:  Enzymatic Nucleic Acid
cuggugucggagguuacucccuucaaggacaucguccggguuguucgu

SEQ ID NO: 5300 - RNA, 48 nt, Artificial Sequence
  Description of Artificial Sequence:  Enzymatic Nucleic Acid
gcugguguggagguuacucccuucaaggacaucguccgggcuuguucg

SEQ ID NO: 5301 - RNA, 48 nt, Artificial Sequence
  Description of Artificial Sequence:  Enzymatic Nucleic Acid
uaaacuacggagguuacucccuucaaggacaucguccgggagagggcu

SEQ ID NO: 5302 - RNA, 48 nt, Artificial Sequence
  Description of Artificial Sequence:  Enzymatic Nucleic Acid
ggaggcucggagguuacucccuucaaggacaucguccggguuggcgaa

SEQ ID NO: 5303 - RNA, 48 nt, Artificial Sequence
  Description of Artificial Sequence:  Enzymatic Nucleic Acid
gggaggcuggagguuacucccuucaaggacaucguccgggcuuggcga

SEQ ID NO: 5304 - RNA, 48 nt, Artificial Sequence
  Description of Artificial Sequence:  Enzymatic Nucleic Acid
cacuggccggagguuacucccuucaaggacaucguccgggugagaauu

SEQ ID NO: 5305 - RNA, 48 nt, Artificial Sequence
  Description of Artificial Sequence:  Enzymatic Nucleic Acid
acacuggcggagguuacucccuucaaggacaucguccgggcugagaau

SEQ ID NO: 5306 - RNA, 48 nt, Artificial Sequence
  Description of Artificial Sequence:  Enzymatic Nucleic Acid
uguuuuucggagguuacucccuucaaggacaucguccgggauucacug

SEQ ID NO: 5307 - RNA, 48 nt, Artificial Sequence
  Description of Artificial Sequence:  Enzymatic Nucleic Acid
cuguuuuuggagguuacucccuucaaggacaucguccgggcauucacu

SEQ ID NO: 5308 - RNA, 48 nt, Artificial Sequence
  Description of Artificial Sequence:  Enzymatic Nucleic Acid
aguaguucggagguuacucccuucaaggacaucguccgggaagguaac

SEQ ID NO: 5309 - RNA, 48 nt, Artificial Sequence
  Description of Artificial Sequence:  Enzymatic Nucleic Acid
caguaguuggagguuacucccuucaaggacaucguccgggcaagguaa

SEQ ID NO: 5310 - RNA, 48 nt, Artificial Sequence
  Description of Artificial Sequence:  Enzymatic Nucleic Acid
ccauuaucggagguuacucccuucaaggacaucguccgggaguaguuc

SEQ ID NO: 5311 - RNA, 48 nt, Artificial Sequence
  Description of Artificial Sequence:  Enzymatic Nucleic Acid
uccauuauggagguuacucccuucaaggacaucguccgggcaguaguu

SEQ ID NO: 5312 - RNA, 48 nt, Artificial Sequence
  Description of Artificial Sequence:  Enzymatic Nucleic Acid
accugcucggagguuacucccuucaaggacaucguccgggauuaucca

SEQ ID NO: 5313 - RNA, 48 nt, Artificial Sequence
  Description of Artificial Sequence:  Enzymatic Nucleic Acid
caccugcuggagguuacucccuucaaggacaucguccgggcauuaucc

SEQ ID NO: 5314 - RNA, 48 nt, Artificial Sequence
  Description of Artificial Sequence:  Enzymatic Nucleic Acid
aucagcacggagguuacucccuucaaggacaucguccgggugcuccau

SEQ ID NO: 5315 - RNA, 48 nt, Artificial Sequence
  Description of Artificial Sequence:  Enzymatic Nucleic Acid
ccgucaucggagguuacucccuucaaggacaucguccggguuaguagc

SEQ ID NO: 5316 - RNA, 48 nt, Artificial Sequence
  Description of Artificial Sequence:  Enzymatic Nucleic Acid
accgucauggagguuacucccuucaaggacaucguccgggcuuaguag

SEQ ID NO: 5317 - RNA, 48 nt, Artificial Sequence
  Description of Artificial Sequence:  Enzymatic Nucleic Acid
guagacacggagguuacucccuucaaggacaucguccggggucauccu

SEQ ID NO: 5318 - RNA, 48 nt, Artificial Sequence
  Description of Artificial Sequence:  Enzymatic Nucleic Acid
ugaaauacggagguuacucccuucaaggacaucguccggguugaguag

SEQ ID NO: 5319 - RNA, 48 nt, Artificial Sequence
  Description of Artificial Sequence:  Enzymatic Nucleic Acid
guaucuacggagguuacucccuucaaggacaucguccgggauucgugu

SEQ ID NO: 5320 - RNA, 48 nt, Artificial Sequence
  Description of Artificial Sequence:  Enzymatic Nucleic Acid
cacuguauggagguuacucccuucaaggacaucguccggguaccauuc

SEQ ID NO: 5321 - RNA, 48 nt, Artificial Sequence
  Description of Artificial Sequence:  Enzymatic Nucleic Acid
ccagagccggagguuacucccuucaaggacaucguccggggcacuuuu

SEQ ID NO: 5322 - RNA, 48 nt, Artificial Sequence
  Description of Artificial Sequence:  Enzymatic Nucleic Acid
cccagagcggagguuacucccuucaaggacaucguccgggcgcacuuu

SEQ ID NO: 5323 - RNA, 48 nt, Artificial Sequence
  Description of Artificial Sequence:  Enzymatic Nucleic Acid
acuccuccggagguuacucccuucaaggacaucguccgggagagcccg

SEQ ID NO: 5324 - RNA, 48 nt, Artificial Sequence
  Description of Artificial Sequence:  Enzymatic Nucleic Acid
aacuccucggagguuacucccuucaaggacaucguccgggcagagccc

SEQ ID NO: 5325 - RNA, 48 nt, Artificial Sequence
  Description of Artificial Sequence:  Enzymatic Nucleic Acid
uaacuccuggagguuacucccuucaaggacaucguccgggccagagcc

SEQ ID NO: 5326 - RNA, 48 nt, Artificial Sequence
  Description of Artificial Sequence:  Enzymatic Nucleic Acid
guuaacucggagguuacucccuucaaggacaucguccgggucccagag

SEQ ID NO: 5327 - RNA, 48 nt, Artificial Sequence
  Description of Artificial Sequence:  Enzymatic Nucleic Acid
cguuaacuggagguuacucccuucaaggacaucguccgggcucccaga

SEQ ID NO: 5328 - RNA, 48 nt, Artificial Sequence
  Description of Artificial Sequence:  Enzymatic Nucleic Acid
cucuccguggagguuacucccuucaaggacaucguccggguggcugcg

SEQ ID NO: 5329 - RNA, 48 nt, Artificial Sequence
  Description of Artificial Sequence:  Enzymatic Nucleic Acid
ucacucucggagguuacucccuucaaggacaucguccggggucuggcu

SEQ ID NO: 5330 - RNA, 48 nt, Artificial Sequence
  Description of Artificial Sequence:  Enzymatic Nucleic Acid
aucacucuggagguuacucccuucaaggacaucguccgggcgucuggc

SEQ ID NO: 5331 - RNA, 48 nt, Artificial Sequence
  Description of Artificial Sequence:  Enzymatic Nucleic Acid
guaucacuggagguuacucccuucaaggacaucguccggguccgucug

SEQ ID NO: 5332 - RNA, 48 nt, Artificial Sequence
  Description of Artificial Sequence:  Enzymatic Nucleic Acid
gcuccacuggagguuacucccuucaaggacaucguccgggugcugggg

SEQ ID NO: 5333 - RNA, 48 nt, Artificial Sequence
  Description of Artificial Sequence:  Enzymatic Nucleic Acid
cagugcucggagguuacucccuucaaggacaucguccgggacucugcu

SEQ ID NO: 5334 - RNA, 48 nt, Artificial Sequence
  Description of Artificial Sequence:  Enzymatic Nucleic Acid
acagugcuggagguuacucccuucaaggacaucguccgggcacucugc

SEQ ID NO: 5335 - RNA, 48 nt, Artificial Sequence
  Description of Artificial Sequence:  Enzymatic Nucleic Acid
aauccagcggagguuacucccuucaaggacaucguccgggagguaugu

SEQ ID NO: 5336 - RNA, 48 nt, Artificial Sequence
  Description of Artificial Sequence:  Enzymatic Nucleic Acid
ucucaaucggagguuacucccuucaaggacaucguccgggagccaggu

SEQ ID NO: 5337 - RNA, 48 nt, Artificial Sequence
  Description of Artificial Sequence:  Enzymatic Nucleic Acid
uucucaauggagguuacucccuucaaggacaucguccgggcagccagg

SEQ ID NO: 5338 - RNA, 48 nt, Artificial Sequence
  Description of Artificial Sequence:  Enzymatic Nucleic Acid
ucaucauuggagguuacucccuucaaggacaucguccgggucaaucca

SEQ ID NO: 5339 - RNA, 48 nt, Artificial Sequence
  Description of Artificial Sequence:  Enzymatic Nucleic Acid
guggauucggagguuacucccuucaaggacaucguccgggauuguauu

SEQ ID NO: 5340 - RNA, 48 nt, Artificial Sequence
  Description of Artificial Sequence:  Enzymatic Nucleic Acid
gguggauuggagguuacucccuucaaggacaucguccgggcauuguau

SEQ ID NO: 5341 - RNA, 48 nt, Artificial Sequence
  Description of Artificial Sequence:  Enzymatic Nucleic Acid
uuucagguggagguuacucccuucaaggacaucguccggguuggugga

SEQ ID NO: 5342 - RNA, 48 nt, Artificial Sequence
  Description of Artificial Sequence:  Enzymatic Nucleic Acid
acaucaucggagguuacucccuucaaggacaucguccggguuauuaau

SEQ ID NO: 5343 - RNA, 48 nt, Artificial Sequence
  Description of Artificial Sequence:  Enzymatic Nucleic Acid
aacaucauggagguuacucccuucaaggacaucguccgggcuuauuaa

SEQ ID NO: 5344 - RNA, 48 nt, Artificial Sequence
  Description of Artificial Sequence:  Enzymatic Nucleic Acid
aggauguuggagguuacucccuucaaggacaucguccgggugcugaaa

SEQ ID NO: 5345 - RNA, 48 nt, Artificial Sequence
  Description of Artificial Sequence:  Enzymatic Nucleic Acid
gagccuccggagguuacucccuucaaggacaucguccggggaggaugu

SEQ ID NO: 5346 - RNA, 48 nt, Artificial Sequence
  Description of Artificial Sequence:  Enzymatic Nucleic Acid
ugagccucggagguuacucccuucaaggacaucguccgggcgaggaug

SEQ ID NO: 5347 - RNA, 48 nt, Artificial Sequence
  Description of Artificial Sequence:  Enzymatic Nucleic Acid
augagccuggagguuacucccuucaaggacaucguccgggccgaggau

SEQ ID NO: 5348 - RNA, 48 nt, Artificial Sequence
  Description of Artificial Sequence:  Enzymatic Nucleic Acid
aaaugagcggagguuacucccuucaaggacaucguccgggucccgagg

SEQ ID NO: 5349 - RNA, 48 nt, Artificial Sequence
  Description of Artificial Sequence:  Enzymatic Nucleic Acid
ucagaagcggagguuacucccuucaaggacaucguccgggacaaauga

SEQ ID NO: 5350 - RNA, 48 nt, Artificial Sequence
  Description of Artificial Sequence:  Enzymatic Nucleic Acid
gauuuggcggagguuacucccuucaaggacaucguccgggagguggga

SEQ ID NO: 5351 - RNA, 48 nt, Artificial Sequence
  Description of Artificial Sequence:  Enzymatic Nucleic Acid
auuuccgcggagguuacucccuucaaggacaucguccggguucagguc

SEQ ID NO: 5352 - RNA, 48 nt, Artificial Sequence
  Description of Artificial Sequence:  Enzymatic Nucleic Acid
ugaauuucggagguuacucccuucaaggacaucguccggggccuucag

SEQ ID NO: 5353 - RNA, 48 nt, Artificial Sequence
  Description of Artificial Sequence:  Enzymatic Nucleic Acid
gugaauuuggagguuacucccuucaaggacaucguccgggcgccuuca

SEQ ID NO: 5354 - RNA, 48 nt, Artificial Sequence
  Description of Artificial Sequence:  Enzymatic Nucleic Acid
acugccccggagguuacucccuucaaggacaucguccggggugaauuu

SEQ ID NO: 5355 - RNA, 48 nt, Artificial Sequence
  Description of Artificial Sequence:  Enzymatic Nucleic Acid
gacugcccggagguuacucccuucaaggacaucguccgggcgugaauu

SEQ ID NO: 5356 - RNA, 48 nt, Artificial Sequence
  Description of Artificial Sequence:  Enzymatic Nucleic Acid
agacugccggagguuacucccuucaaggacaucguccgggccgugaau

SEQ ID NO: 5357 - RNA, 48 nt, Artificial Sequence
  Description of Artificial Sequence:  Enzymatic Nucleic Acid
gagacugcggagguuacucccuucaaggacaucguccgggcccgugaa

SEQ ID NO: 5358 - RNA, 48 nt, Artificial Sequence
  Description of Artificial Sequence:  Enzymatic Nucleic Acid
gagcugucggagguuacucccuucaaggacaucguccgggaagucaga

SEQ ID NO: 5359 - RNA, 48 nt, Artificial Sequence
  Description of Artificial Sequence:  Enzymatic Nucleic Acid
ggagcuguggagguuacucccuucaaggacaucguccgggcaagucag

SEQ ID NO: 5360 - RNA, 48 nt, Artificial Sequence
  Description of Artificial Sequence:  Enzymatic Nucleic Acid
aucaucccggagguuacucccuucaaggacaucguccgggaggagcug

SEQ ID NO: 5361 - RNA, 48 nt, Artificial Sequence
  Description of Artificial Sequence:  Enzymatic Nucleic Acid
aaucauccggagguuacucccuucaaggacaucguccgggcaggagcu

SEQ ID NO: 5362 - RNA, 48 nt, Artificial Sequence
  Description of Artificial Sequence:  Enzymatic Nucleic Acid
uaaucaucggagguuacucccuucaaggacaucguccgggccaggagc

SEQ ID NO: 5363 - RNA, 48 nt, Artificial Sequence
  Description of Artificial Sequence:  Enzymatic Nucleic Acid
auaaucauggagguuacucccuucaaggacaucguccgggcccaggag

SEQ ID NO: 5364 - RNA, 48 nt, Artificial Sequence
  Description of Artificial Sequence:  Enzymatic Nucleic Acid
agcuguucggagguuacucccuucaaggacaucguccgggauggucau

SEQ ID NO: 5365 - RNA, 48 nt, Artificial Sequence
  Description of Artificial Sequence:  Enzymatic Nucleic Acid
gagcuguuggagguuacucccuucaaggacaucguccgggcaugguca

SEQ ID NO: 5366 - RNA, 48 nt, Artificial Sequence
  Description of Artificial Sequence:  Enzymatic Nucleic Acid
acuugucuggagguuacucccuucaaggacaucguccgggugagauca

SEQ ID NO: 5367 - RNA, 48 nt, Artificial Sequence
  Description of Artificial Sequence:  Enzymatic Nucleic Acid
gaacuuguggagguuacucccuucaaggacaucguccgggucugagau

SEQ ID NO: 5368 - RNA, 48 nt, Artificial Sequence
  Description of Artificial Sequence:  Enzymatic Nucleic Acid
uuggcuucggagguuacucccuucaaggacaucguccggguuugggau

SEQ ID NO: 5369 - RNA, 48 nt, Artificial Sequence
  Description of Artificial Sequence:  Enzymatic Nucleic Acid
guuggcuuggagguuacucccuucaaggacaucguccgggcuuuggga

SEQ ID NO: 5370 - RNA, 48 nt, Artificial Sequence
  Description of Artificial Sequence:  Enzymatic Nucleic Acid
aagacuucggagguuacucccuucaaggacaucguccgggucagaguu

SEQ ID NO: 5371 - RNA, 48 nt, Artificial Sequence
  Description of Artificial Sequence:  Enzymatic Nucleic Acid
aaagacuuggagguuacucccuucaaggacaucguccgggcucagagu

SEQ ID NO: 5372 - RNA, 48 nt, Artificial Sequence
  Description of Artificial Sequence:  Enzymatic Nucleic Acid
aauguuuuggagguuacucccuucaaggacaucguccgggugguuuaa

SEQ ID NO: 5373 - RNA, 48 nt, Artificial Sequence
  Description of Artificial Sequence:  Enzymatic Nucleic Acid
aucugugcggagguuacucccuucaaggacaucguccgggauuuucaa

SEQ ID NO: 5374 - RNA, 48 nt, Artificial Sequence
  Description of Artificial Sequence:  Enzymatic Nucleic Acid
gaaaagauggagguuacucccuucaaggacaucguccgggugugccau

SEQ ID NO: 5375 - RNA, 48 nt, Artificial Sequence
  Description of Artificial Sequence:  Enzymatic Nucleic Acid
ucaacagcggagguuacucccuucaaggacaucguccgggugaauagc

SEQ ID NO: 5376 - RNA, 48 nt, Artificial Sequence
  Description of Artificial Sequence:  Enzymatic Nucleic Acid
agaucgacggagguuacucccuucaaggacaucguccggguuaucaac

SEQ ID NO: 5377 - RNA, 48 nt, Artificial Sequence
  Description of Artificial Sequence:  Enzymatic Nucleic Acid
ggauauuuggagguuacucccuucaaggacaucguccgggugauuuca

SEQ ID NO: 5378 - RNA, 48 nt, Artificial Sequence
  Description of Artificial Sequence:  Enzymatic Nucleic Acid
ggcggaguggagguuacucccuucaaggacaucguccggguguggagg

SEQ ID NO: 5379 - RNA, 48 nt, Artificial Sequence
  Description of Artificial Sequence:  Enzymatic Nucleic Acid
aggugucuggagguuacucccuucaaggacaucguccggguggcggag

SEQ ID NO: 5380 - RNA, 48 nt, Artificial Sequence
  Description of Artificial Sequence:  Enzymatic Nucleic Acid
cuagguguggagguuacucccuucaaggacaucguccgggucuggcgg

SEQ ID NO: 5381 - RNA, 48 nt, Artificial Sequence
  Description of Artificial Sequence:  Enzymatic Nucleic Acid
gugaaugcggagguuacucccuucaaggacaucguccgggaggaaugg

SEQ ID NO: 5382 - RNA, 48 nt, Artificial Sequence
  Description of Artificial Sequence:  Enzymatic Nucleic Acid
uccacuucggagguuacucccuucaaggacaucguccgggacauaauu

SEQ ID NO: 5383 - RNA, 48 nt, Artificial Sequence
  Description of Artificial Sequence:  Enzymatic Nucleic Acid
auccacuuggagguuacucccuucaaggacaucguccgggcacauaau

SEQ ID NO: 5384 - RNA, 48 nt, Artificial Sequence
  Description of Artificial Sequence:  Enzymatic Nucleic Acid
cuccuaucggagguuacucccuucaaggacaucguccgggacuuccac

SEQ ID NO: 5385 - RNA, 48 nt, Artificial Sequence
  Description of Artificial Sequence:  Enzymatic Nucleic Acid
ucuccuauggagguuacucccuucaaggacaucguccgggcacuucca

SEQ ID NO: 5386 - RNA, 48 nt, Artificial Sequence
  Description of Artificial Sequence:  Enzymatic Nucleic Acid
caguucucggagguuacucccuucaaggacaucguccggguauccacu

SEQ ID NO: 5387 - RNA, 48 nt, Artificial Sequence
  Description of Artificial Sequence:  Enzymatic Nucleic Acid
gcaguucuggagguuacucccuucaaggacaucguccgggcuauccac

SEQ ID NO: 5388 - RNA, 48 nt, Artificial Sequence
  Description of Artificial Sequence:  Enzymatic Nucleic Acid
cugcaguuggagguuacucccuucaaggacaucguccggguccuaucc

SEQ ID NO: 5389 - RNA, 48 nt, Artificial Sequence
  Description of Artificial Sequence:  Enzymatic Nucleic Acid
auucagccggagguuacucccuucaaggacaucguccggguaggcuau

SEQ ID NO: 5390 - RNA, 48 nt, Artificial Sequence
  Description of Artificial Sequence:  Enzymatic Nucleic Acid
aauucagcggagguuacucccuucaaggacaucguccgggcuaggcua

SEQ ID NO: 5391 - RNA, 48 nt, Artificial Sequence
  Description of Artificial Sequence:  Enzymatic Nucleic Acid
uuauuuauggagguuacucccuucaaggacaucguccgggugacaaaa

SEQ ID NO: 5392 - RNA, 48 nt, Artificial Sequence
  Description of Artificial Sequence:  Enzymatic Nucleic Acid
caggaaguggagguuacucccuucaaggacaucguccggguaaaauac

SEQ ID NO: 5393 - RNA, 48 nt, Artificial Sequence
  Description of Artificial Sequence:  Enzymatic Nucleic Acid
aucgccccggagguuacucccuucaaggacaucguccggguacaggaa

SEQ ID NO: 5394 - RNA, 48 nt, Artificial Sequence
  Description of Artificial Sequence:  Enzymatic Nucleic Acid
uaucgcccggagguuacucccuucaaggacaucguccgggcuacagga

SEQ ID NO: 5395 - RNA, 48 nt, Artificial Sequence
  Description of Artificial Sequence:  Enzymatic Nucleic Acid
auaucgccggagguuacucccuucaaggacaucguccgggccuacagg

SEQ ID NO: 5396 - RNA, 48 nt, Artificial Sequence
  Description of Artificial Sequence:  Enzymatic Nucleic Acid
uauaucgcggagguuacucccuucaaggacaucguccgggcccuacag

SEQ ID NO: 5397 - RNA, 48 nt, Artificial Sequence
  Description of Artificial Sequence:  Enzymatic Nucleic Acid
uuaucgccggagguuacucccuucaaggacaucguccgggccuacagg

SEQ ID NO: 5398 - RNA, 48 nt, Artificial Sequence
  Description of Artificial Sequence:  Enzymatic Nucleic Acid
uuuaucgcggagguuacucccuucaaggacaucguccgggcccuacag

SEQ ID NO: 5399 - RNA, 23 nt, Artificial Sequence
  Description of Artificial Sequence:  Enzymatic Nucleic Acid
caagguaaggcauuuguccauga

SEQ ID NO: 5400 - RNA, 23 nt, Artificial Sequence
  Description of Artificial Sequence:  Enzymatic Nucleic Acid
caaagaagcuccaaacaagcaaa

SEQ ID NO: 5401 - RNA, 23 nt, Artificial Sequence
  Description of Artificial Sequence:  Enzymatic Nucleic Acid
gucaaacaaaguggugccaucau

SEQ ID NO: 5402 - RNA, 23 nt, Artificial Sequence
  Description of Artificial Sequence:  Enzymatic Nucleic Acid
cauaccuggcuggauugagaaug

SEQ ID NO: 5403 - RNA, 23 nt, Artificial Sequence
  Description of Artificial Sequence:  Enzymatic Nucleic Acid
caagcaaguguguuucagcagaa

SEQ ID NO: 5404 - RNA, 23 nt, Artificial Sequence
  Description of Artificial Sequence:  Enzymatic Nucleic Acid
gcucauuuguggcuucugauguc

SEQ ID NO: 5405 - RNA, 23 nt, Artificial Sequence
  Description of Artificial Sequence:  Enzymatic Nucleic Acid
uaugaccauggaacagcucacaa

SEQ ID NO: 5406 - RNA, 23 nt, Artificial Sequence
  Description of Artificial Sequence:  Enzymatic Nucleic Acid
ggauaggagaacugcagcuguca

SEQ ID NO: 5407 - DNA, 15 bp, Artificial Sequence
  Description of Artificial Sequence:  Enzymatic Nucleic Acid
tcttgattcttcacc

SEQ ID NO: 5408 - DNA, 15 bp, Artificial Sequence
  Description of Artificial Sequence:  Enzymatic Nucleic Acid
cttgattcttcacct

SEQ ID NO: 5409 - DNA, 15 bp, Artificial Sequence
  Description of Artificial Sequence:  Enzymatic Nucleic Acid
ttgattcttcacctt

SEQ ID NO: 5410 - DNA, 15 bp, Artificial Sequence
  Description of Artificial Sequence:  Enzymatic Nucleic Acid
tgattcttcaccttc

SEQ ID NO: 5411 - DNA, 15 bp, Artificial Sequence
  Description of Artificial Sequence:  Enzymatic Nucleic Acid
gattcttcaccttct

SEQ ID NO: 5412 - DNA, 15 bp, Artificial Sequence
  Description of Artificial Sequence:  Enzymatic Nucleic Acid
tcctgatttcattgc

SEQ ID NO: 5413 - DNA, 15 bp, Artificial Sequence
  Description of Artificial Sequence:  Enzymatic Nucleic Acid
cctgatttcattgca

SEQ ID NO: 5414 - DNA, 15 bp, Artificial Sequence
  Description of Artificial Sequence:  Enzymatic Nucleic Acid
ctgatttcattgcag

SEQ ID NO: 5415 - DNA, 15 bp, Artificial Sequence
  Description of Artificial Sequence:  Enzymatic Nucleic Acid
tgatttcattgcagg

SEQ ID NO: 5416 - DNA, 15 bp, Artificial Sequence
  Description of Artificial Sequence:  Enzymatic Nucleic Acid
atttcattgcaggaa

SEQ ID NO: 5417 - DNA, 25 bp, Artificial Sequence
  Description of Artificial Sequence:  Enzymatic Nucleic Acid
  misc_feature (1)..(1): n stands for inverted deoxyabasic derivative
  misc_feature (25)..(25): n stands for inverted deoxyabasic derivative
  misc_feature (2)..(8): 2'-O-Methyl
  misc_feature (18)..(24): 2'-O-Methyl
  misc_feature (9)..(17): Phosphorothioate 3'-Internucleotide Linkage
nucauggacaaatgcctuaccuugn

SEQ ID NO: 5418 - DNA, 25 bp, Artificial Sequence
  Description of Artificial Sequence:  Enzymatic Nucleic Acid
  misc_feature (1)..(1): n stands for inverted deoxyabasic derivative
  misc_feature (25)..(25): n stands for inverted deoxyabasic derivative
  misc_feature (2)..(8): 2'-O-Methyl
  misc_feature (18)..(24): 2'-O-Methyl
  misc_feature (9)..(17): Phosphorothioate 3'-Internucleotide Linkage
nuuugcuugtttggagcuucuuugn

SEQ ID NO: 5419 - DNA, 25 bp, Artificial Sequence
  Description of Artificial Sequence:  Enzymatic Nucleic Acid
  misc_feature (1)..(1): n stands for inverted deoxyabasic derivative
  misc_feature (25)..(25): n stands for inverted deoxyabasic derivative
  misc_feature (2)..(8): 2'-O-Methyl
  misc_feature (18)..(24): 2'-O-Methyl
  misc_feature (9)..(17): Phosphorothioate 3'-Internucleotide Linkage
naugauggcaccactttguuugacn

SEQ ID NO: 5420 - DNA, 25 bp, Artificial Sequence
  Description of Artificial Sequence:  Enzymatic Nucleic Acid
  misc_feature (1)..(1): n stands for inverted deoxyabasic derivative
  misc_feature (25)..(25): n stands for inverted deoxyabasic derivative
  misc_feature (2)..(8): 2'-O-Methyl
  misc_feature (18)..(24): 2'-O-Methyl
  misc_feature (9)..(17): Phosphorothioate 3'-Internucleotide Linkage
ncauucucaatccagccagguaugn

SEQ ID NO: 5421 - RNA, 25 nt, Artificial Sequence
  Description of Artificial Sequence:  Enzymatic Nucleic Acid
  misc_feature (1)..(1): n stands for inverted deoxyabasic derivative
  misc_feature (25)..(25): n stands for inverted deoxyabasic derivative
  misc_feature (2)..(8): 2'-O-Methyl
  misc_feature (18)..(24): 2'-O-Methyl
  misc_feature (9)..(17): Phosphorothioate 3'-Internucleotide Linkage
nuucugcugaaacacacuugcuugn

SEQ ID NO: 5422 - RNA, 25 nt, Artificial Sequence
  Description of Artificial Sequence:  Enzymatic Nucleic Acid
  misc_feature (1)..(1): n stands for inverted deoxyabasic derivative
  misc_feature (25)..(25): n stands for inverted deoxyabasic derivative
  misc_feature (2)..(8): 2'-O-Methyl
  misc_feature (18)..(24): 2'-O-Methyl
  misc_feature (9)..(17): Phosphorothioate 3'-Internucleotide Linkage
ngacaucagaagccacaaaugagcn

SEQ ID NO: 5423 - DNA, 25 bp, Artificial Sequence
  Description of Artificial Sequence:  Enzymatic Nucleic Acid
  misc_feature (1)..(1): n stands for inverted deoxyabasic derivative
  misc_feature (25)..(25): n stands for inverted deoxyabasic derivative
  misc_feature (2)..(8): 2'-O-Methyl
  misc_feature (18)..(24): 2'-O-Methyl
  misc_feature (9)..(17): Phosphorothioate 3'-Internucleotide Linkage
nuugugagctgttccatggucauan

SEQ ID NO: 5424 - DNA, 25 bp, Artificial Sequence
  Description of Artificial Sequence:  Enzymatic Nucleic Acid
  misc_feature (1)..(1): n stands for inverted deoxyabasic derivative
  misc_feature (25)..(25): n stands for inverted deoxyabasic derivative
  misc_feature (2)..(8): 2'-O-Methyl
  misc_feature (18)..(24): 2'-O-Methyl
  misc_feature (9)..(17): Phosphorothioate 3'-Internucleotide Linkage
nugacagctgcagttctccuauccn

SEQ ID NO: 5425 - RNA, 37 nt, Artificial Sequence
  Description of Artificial Sequence:  Enzymatic Nucleic Acid
  misc_feature (1)..(4): Phosphorothioate 3'-Internucleotide Linkage
  misc_feature (1)..(8): 2'-O-Methyl
  misc_feature (12)..(12): 2'-O-Methyl
  misc_feature (14)..(26): 2'-O-Methyl
  misc_feature (28)..(29): 2'-O-Methyl
  misc_feature (31)..(36): 2'-O-Methyl
  misc_feature (9)..(9): 2'-deoxy-2'-C-Allyl
  misc_feature (37)..(37): n stands for inverted deoxyabasic derivative
ggugaagcugaugaggccguuaggccgaaaucaagan

SEQ ID NO: 5426 - RNA, 37 nt, Artificial Sequence
  Description of Artificial Sequence:  Enzymatic Nucleic Acid
  misc_feature (1)..(4): Phosphorothioate 3'-Internucleotide Linkage
  misc_feature (1)..(8): 2'-O-Methyl
  misc_feature (12)..(12): 2'-O-Methyl
  misc_feature (14)..(26): 2'-O-Methyl
  misc_feature (28)..(29): 2'-O-Methyl
  misc_feature (31)..(36): 2'-O-Methyl
  misc_feature (9)..(9): 2'-deoxy-2'-C-Allyl
  misc_feature (37)..(37): n stands for inverted deoxyabasic derivative
aggugaacugaugaggccguuaggccgaaaaucaagn

SEQ ID NO: 5427 - RNA, 37 nt, Artificial Sequence
  Description of Artificial Sequence:  Enzymatic Nucleic Acid
  misc_feature (1)..(4): Phosphorothioate 3'-Internucleotide Linkage
  misc_feature (1)..(8): 2'-O-Methyl
  misc_feature (12)..(12): 2'-O-Methyl
  misc_feature (14)..(26): 2'-O-Methyl
  misc_feature (28)..(29): 2'-O-Methyl
  misc_feature (31)..(36): 2'-O-Methyl
  misc_feature (9)..(9): 2'-deoxy-2'-C-Allyl
  misc_feature (30)..(30): n stands for inosine
  misc_feature (37)..(37): n stands for inverted deoxyabasic derivative
aaggugacugaugaggccguuaggccgaanaaucaan

SEQ ID NO: 5428 - RNA, 37 nt, Artificial Sequence
  Description of Artificial Sequence:  Enzymatic Nucleic Acid
  misc_feature (1)..(4): Phosphorothioate 3'-Internucleotide Linkage
  misc_feature (1)..(8): 2'-O-Methyl
  misc_feature (12)..(12): 2'-O-Methyl
  misc_feature (14)..(26): 2'-O-Methyl
  misc_feature (28)..(29): 2'-O-Methyl
  misc_feature (31)..(36): 2'-O-Methyl
  misc_feature (9)..(9): 2'-deoxy-2'-C-Allyl
  misc_feature (37)..(37): n stands for inverted deoxyabasic derivative
gaaggugcugaugaggccguuaggccgaaagaaucan

SEQ ID NO: 5429 - RNA, 37 nt, Artificial Sequence
  Description of Artificial Sequence:  Enzymatic Nucleic Acid
  misc_feature (1)..(4): Phosphorothioate 3'-Internucleotide Linkage
  misc_feature (1)..(8): 2'-O-Methyl
  misc_feature (12)..(12): 2'-O-Methyl
  misc_feature (14)..(26): 2'-O-Methyl
  misc_feature (28)..(29): 2'-O-Methyl
  misc_feature (31)..(36): 2'-O-Methyl
  misc_feature (9)..(9): 2'-deoxy-2'-C-Allyl
  misc_feature (37)..(37): n stands for inverted deoxyabasic derivative
agaaggucugaugaggccguuaggccgaaaagaaucn

SEQ ID NO: 5430 - RNA, 37 nt, Artificial Sequence
  Description of Artificial Sequence:  Enzymatic Nucleic Acid
  misc_feature (1)..(4): Phosphorothioate 3'-Internucleotide Linkage
  misc_feature (1)..(8): 2'-O-Methyl
  misc_feature (12)..(12): 2'-O-Methyl
  misc_feature (14)..(26): 2'-O-Methyl
  misc_feature (28)..(29): 2'-O-Methyl
  misc_feature (31)..(36): 2'-O-Methyl
  misc_feature (9)..(9): 2'-deoxy-2'-C-Allyl
  misc_feature (37)..(37): n stands for inverted deoxyabasic derivative
gcaaugacugaugaggccguuaggccgaaaucaggan

SEQ ID NO: 5431 - RNA, 37 nt, Artificial Sequence
  Description of Artificial Sequence:  Enzymatic Nucleic Acid
  misc_feature (1)..(4): Phosphorothioate 3'-Internucleotide Linkage
  misc_feature (1)..(8): 2'-O-Methyl
  misc_feature (12)..(12): 2'-O-Methyl
  misc_feature (14)..(26): 2'-O-Methyl
  misc_feature (28)..(29): 2'-O-Methyl
  misc_feature (31)..(36): 2'-O-Methyl
  misc_feature (9)..(9): 2'-deoxy-2'-C-Allyl
  misc_feature (37)..(37): n stands for inverted deoxyabasic derivative
ugcaaugcugaugaggccguuaggccgaaaaucaggn

SEQ ID NO: 5432 - RNA, 37 nt, Artificial Sequence
  Description of Artificial Sequence:  Enzymatic Nucleic Acid
  misc_feature (1)..(4): Phosphorothioate 3'-Internucleotide Linkage
  misc_feature (1)..(8): 2'-O-Methyl
  misc_feature (12)..(12): 2'-O-Methyl
  misc_feature (14)..(26): 2'-O-Methyl
  misc_feature (28)..(29): 2'-O-Methyl
  misc_feature (31)..(36): 2'-O-Methyl
  misc_feature (9)..(9): 2'-deoxy-2'-C-Allyl
  misc_feature (37)..(37): n stands for inverted deoxyabasic derivative
cugcaaucugaugaggccguuaggccgaaaaaucagn

SEQ ID NO: 5433 - RNA, 37 nt, Artificial Sequence
  Description of Artificial Sequence:  Enzymatic Nucleic Acid
  misc_feature (1)..(4): Phosphorothioate 3'-Internucleotide Linkage
  misc_feature (1)..(8): 2'-O-Methyl
  misc_feature (12)..(12): 2'-O-Methyl
  misc_feature (14)..(26): 2'-O-Methyl
  misc_feature (28)..(29): 2'-O-Methyl
  misc_feature (31)..(36): 2'-O-Methyl
  misc_feature (9)..(9): 2'-deoxy-2'-C-Allyl
  misc_feature (30)..(30): n stands for inosine
  misc_feature (37)..(37): n stands for inverted deoxyabasic derivative
ccugcaacugaugaggccguuaggccgaanaaaucan

SEQ ID NO: 5434 - RNA, 37 nt, Artificial Sequence
  Description of Artificial Sequence:  Enzymatic Nucleic Acid
  misc_feature (1)..(4): Phosphorothioate 3'-Internucleotide Linkage
  misc_feature (1)..(8): 2'-O-Methyl
  misc_feature (12)..(12): 2'-O-Methyl
  misc_feature (14)..(26): 2'-O-Methyl
  misc_feature (28)..(29): 2'-O-Methyl
  misc_feature (31)..(36): 2'-O-Methyl
  misc_feature (9)..(9): 2'-deoxy-2'-C-Allyl
  misc_feature (37)..(37): n stands for inverted deoxyabasic derivative
uuccugccugaugaggccguuaggccgaaaugaaaun

SEQ ID NO: 5435 - DNA, 32 bp, Artificial Sequence
  Description of Artificial Sequence:  Enzymatic Nucleic Acid
cgaaatctcgagcagacttgtgggagaagctc

SEQ ID NO: 5436 - DNA, 34 bp, Artificial Sequence
  Description of Artificial Sequence:  Enzymatic Nucleic Acid
agcacactgcagagttgctggccagcttacctcc

SEQ ID NO: 5437 - RNA, 15 nt, Artificial Sequence
  Description of Artificial Sequence:  Nucleic Acid Substrate
  misc_feature (1)..(6): n stands for a, c, g, or u
  misc_feature (9)..(15): n stands for a, c, g, or u
nnnnnnuhnnnnnnn

SEQ ID NO: 5438 - RNA, 36 nt, Artificial Sequence
  Description of Artificial Sequence: Enzymatic Nucleic Acid
  misc_feature (1)..(7): n stands for a, c, g, or u
  misc_feature (16)..(18): n stands for a, c, g, or u
  misc_feature (23)..(25): n stands for a, c, g, or u
  misc_feature (31)..(36): n stands for a, c, g, or u
  misc_feature (1)..(8): 2'-O-Methyl
  misc_feature (12)..(12): 2'-O-Methyl
  misc_feature (14)..(26): 2'-O-Methyl
  misc_feature (28)..(29): 2'-O-Methyl
  misc_feature (31)..(36): 2'-O-Methyl
  misc_feature (9)..(9): 2'-deoxy-2'-C-Allyl
nnnnnnncugaugagnnngaaannncgaaannnnnn

SEQ ID NO: 5439 - RNA, 14 nt, Artificial Sequence
  Description of Artificial Sequence:  Nucleic Acid Substrate
  misc_feature (1)..(5): n stands for a, c, g, or u
  misc_feature (8)..(14): n stands for a, c, g, or u
nnnnnchnnnnnnn

SEQ ID NO: 5440 - RNA, 35 nt, Artificial Sequence
  Description of Artificial Sequence: Enzymatic Nucleic Acid
  misc_feature (1)..(7): n stands for a, c, g, or u
  misc_feature (16)..(18): n stands for a, c, g, or u
  misc_feature (23)..(25): n stands for a, c, g, or u
  misc_feature (31)..(35): n stands for a, c, g, or u
  misc_feature (1)..(8): 2'-O-Methyl
  misc_feature (12)..(12): 2'-O-Methyl
  misc_feature (14)..(26): 2'-O-Methyl
  misc_feature (28)..(29): 2'-O-Methyl
  misc_feature (31)..(35): 2'-O-Methyl
  misc_feature (30)..(30): n stands for Inosine
  misc_feature (9)..(9): 2'-deoxy-2'-C-Allyl
nnnnnnncugaugagnnngaaannncgaannnnnn

SEQ ID NO: 5441 - RNA, 15 nt, Artificial Sequence
  Description of Artificial Sequence:  Nucleic Acid Substrate
  misc_feature (1)..(6): n stands for a, c, g, or u
  misc_feature (9)..(15): n stands for a, c, g, or u
nnnnnnygnnnnnnn

SEQ ID NO: 5442 - RNA, 35 nt, Artificial Sequence
  Description of Artificial Sequence: Enzymatic Nucleic Acid
  misc_feature (1)..(7): n stands for a, c, g, or u
  misc_feature (29)..(35): n stands for a, c, g, or u
  misc_feature (1)..(8): 2'-O-Methyl
  misc_feature (13)..(16): 2'-O-Methyl
  misc_feature (18)..(35): 2'-O-Methyl
  misc_feature (11)..(11): Phosphorothioate 3'-Internucleotide Linkage
nnnnnnnugauggcaugcacuaugcgcgnnnnnnn

SEQ ID NO: 5443 - RNA, 16 nt, Artificial Sequence
  Description of Artificial Sequence: Enzymatic Nucleic Acid
gccguggguugcacac

SEQ ID NO: 5444 - RNA, 48 nt, Homo sapiens
  misc_feature (1)..(8): 2'-O-Methyl
  misc_feature (12)..(21): 2'-O-Methyl
  misc_feature (32)..(37): 2'-O-Methyl
  misc_feature (44)..(48): 2'-O-Methyl
  misc_feature (9)..(10): 2'-deoxy-2'-amino
  misc_feature (22)..(26): 2'-deoxy-2'-amino
  misc_feature (38)..(40): 2'-deoxy-2'-amino
gugugcaaccggaggaaacucccuucaaggacgaaaguccgggacggg

SEQ ID NO: 5445 - RNA, 15 nt, Artificial Sequence
  Description of Artificial Sequence: Enzymatic Nucleic Acid
gcgcggcgcaggcac

SEQ ID NO: 5446 - RNA, 36 nt, Homo sapiens
  misc_feature (1)..(7): 2'-O-Methyl
  misc_feature (9)..(15): 2'-O-Methyl
  misc_feature (19)..(19): 2'-O-Methyl
  misc_feature (21)..(21): 2'-O-Methyl
  misc_feature (23)..(23): 2'-O-Methyl
  misc_feature (26)..(26): 2'-O-Methyl
  misc_feature (28)..(35): 2'-O-Methyl
  misc_feature (1)..(4): Phosphorothioate 3'-Internucleotide Linkage
  misc_feature (17)..(17): 2'-Deoxy-2'-Amino
  misc_feature (27)..(27): 2'-Deoxy-2'-Amino
  misc_feature (36)..(36): 3'-3' inverted abasic moiety
gugccuggccgaaaggcgagugaggucugccgcgcn

SEQ ID NO: 5447 - DNA, 16 bp, Artificial Sequence
  Description of Artificial Sequence:  Enzymatic Nucleic Acid
rggctagctacaacga

SEQ ID NO: 5448 - RNA, 13 nt, Artificial Sequence
  Description of Artificial Sequence:  Nucleic Acid Substrate
  misc_feature (1)..(5): n stands for a, c, g, or u
  misc_feature (8)..(13): n stands for a, c, g, or u
nnnnnuhnnnnnn

SEQ ID NO: 5449 - RNA, 24 nt, Artificial Sequence
  Description of Artificial Sequence:  Enzymatic Nucleic Acid
  misc_feature (1)..(6): n stands for a, c, g, or u
  misc_feature (11)..(11): n stands for a, c, g, or u
  misc_feature (20)..(24): n stands for a, c, g, or u
nnnnnncugangagcgaaannnnn

SEQ ID NO: 5450 - RNA, 10 nt, Artificial Sequence
  Description of Artificial Sequence:  Enzymatic Nucleic Acid Stem Loop
gccguuaggc
